(19) United States
(12) Patent Application Publication
(10) Pub. No.: US 2009/0304746 A1
(43) Pub. Date: Dec. 10, 2009

(54) Inducing cellar immune responses to hepatitis C virus using peptide and nucleic acid compositions

(75) Inventors: Alessandro Sette, La Jolla, CA (US); John Sidney, San Diego, CA (US); Scott Southwood, Santee, CA (US); Brian D. Livingston, San Diego, CA (US); Robert Chesnut, Cardiff-by-the-Sea, CA (US); Denise Marie Baker, San Diego, CA (US); Esteban Celis, Rochester, MN (US); Ralph T. Kubo, Carlsbad, CA (US); Howard M. Grey, La Jolla, CA (US)

Correspondence Address: STERNE, KESSLER, GOLDSTEIN & FOX, P.L.L.C., 1100 NEW YORK AVE., WASHINGTON, DC, 20005, US

(73) Assignee: Pharmexa Inc.

(21) Appl. No.: 11/980,348

(22) Filed: Oct. 31, 2007

Related U.S. Application Data
(63) Continuation of application No. 09/357,737, filed on Jul. 19, 1999.
Application No. 09/357,737 is a continuation-in-part of application No. 09/189,702, filed on Nov. 10, 1998, now Pat. No. 7,252,829.
Application No. 09/189,702 is a continuation-in-part of application No. 08/347,610, filed on Dec. 1, 1994, now abandoned.
Application No. 08/347,610 is a continuation-in-part of application No. 08/205,713, filed on Mar. 4, 1994, now abandoned.
Application No. 08/205,713 is a continuation-in-part of application No. 08/159,339, filed on Nov. 29, 1993, now Pat. No. 6,037,135.
Application No. 08/159,339 is a continuation-in-part of application No. 08/103,396, filed on Aug. 6, 1993, now abandoned.
Application No. 08/205,713 is a continuation-in-part of application No. 08/159,184, filed on Nov. 29, 1993, now abandoned.
Application No. 08/159,184 is a continuation-in-part of application No. 08/073,205, filed on Jun. 4, 1993, now abandoned.
Application No. 08/073,205 is a continuation-in-part of application No. 08/027,146, filed on Mar. 5, 1993, now abandoned.

(51) Int. Cl. A61K 39/29; C07K 7/06; C07K 7/08; A61K 38/08; A61K 38/10; A61K 31/7052; C07K 14/00; G01N 33/53; A61K 38/16; A61P 31/12

(52) U.S. Cl. 424/228.1; 530/328; 530/327; 514/16; 514/15; 514/14; 514/44 R; 530/329; 530/326; 530/325; 530/324; 435/7.24; 514/13; 514/12

(57) ABSTRACT

This invention uses our knowledge of the mechanisms by which antigen is recognized by T cells to identify and prepare HCV epitopes, and to develop epitope-based vaccines directed towards HCV. More specifically, this application communicates our discovery of pharmaceutical compositions and methods of use in the prevention and treatment of HCV infection.

### CROSS-REFERENCES TO RELATED APPLICATIONS

[0001] This application is a Continuation-In-Part (“CIP”) of U.S. Ser. No. 09/189,702 filed Nov. 10, 1998, which is a CIP of U.S. Ser. No. 08/205,713 filed Mar. 4, 1994, which is a CIP of U.S. Ser. No. 08/159,184 filed Nov. 29, 1993 and now abandoned, which is a CIP of U.S. Ser. No. 08/073,205 filed Jun. 4, 1993 and now abandoned, which is a CIP of U.S. Ser. No. 08/027,146 filed Mar. 5, 1993 and now abandoned. The present application is also related to U.S. Ser. No. 09/226,775, which is a CIP of U.S. Ser. No. 08/815,396, which claims the benefit of U.S. Ser. No. 60/013,113, now abandoned. Furthermore, the present application is related to U.S. Ser. No. 09/017,735, which is a CIP of abandoned U.S. Ser. No. 08/589,108; U.S. Ser. No. 08/753,622, U.S. Ser. No. 08/822,382, abandoned U.S. Ser. No. 60/013,980, U.S. Ser. No. 08/454,033, U.S. Ser. No. 09/116,424, and U.S. Ser. No. 08/349,177. The present application is also related to U.S. Ser. No. 09/017,524, U.S. Ser. No. 08/821,739, abandoned U.S. Ser. No. 60/013,833, U.S. Ser. No. 08/758,409, U.S. Ser. No. 08/589,107, U.S. Ser. No. 08/451,913, U.S. Ser. No. 08/186,266, U.S. Ser. No. 09/116,061, and U.S. Ser. No. 08/347,610, which is a CIP of U.S. Ser. No. 08/159,339, which is a CIP of abandoned U.S. Ser. No. 08/103,396, which is a CIP of abandoned U.S. Ser. No. 08/027,746, which is a CIP of abandoned U.S. Ser. No. 07/926,666. The present application is also related to U.S. Ser. No. 09/017,743, U.S. Ser. No. 08/753,615; U.S. Ser. No. 08/590,298, U.S. Ser. No. 09/115,400, and U.S. Ser. No. 08/452,843, which is a CIP of U.S. Ser. No. 08/344,824, which is a CIP of abandoned U.S. Ser. No. 08/278,634. The present application is also related to provisional U.S. Ser. No. 60/087,192 and U.S. Ser. No. 09/009,953, which is a CIP of abandoned U.S. Ser. No. 60/036,713 and abandoned U.S. Ser. No. 60/037,432. In addition, the present application is related to U.S. Ser. No. 09/098,584, U.S. Ser. No. 09/239,043, and to Provisional U.S. Patent Application 60/117,486 filed Jan. 27, 1999. The present application is also related to U.S. patent application entitled “Inducing Cellular Immune Responses to Hepatitis C Virus Using Peptide and Nucleic Acid Compositions”, Attorney Docket No. 018623-0013910 filed Jul. 8, 1999. All of the above applications are incorporated herein by reference.

### FEDERALLY SPONSORED RESEARCH AND DEVELOPMENT

[0002] This invention was funded, in part, by the United States government under grants with the National Institutes of Health. The U.S. government has certain rights in this invention.

### INDEX

### I. Background of the Invention

### II. Summary of the Invention

### III. Brief Description of the Figures

### IV. Detailed Description of the Invention

[0003] A. Definitions

[0004] B. Stimulation of CTL and HTL responses

[0005] C. Binding Affinity of Peptide Epitopes for HLA Molecules

[0006] D. Peptide Epitope Binding Motifs and Supermotifs
[0007] 1. HLA-A1 supermotif
[0008] 2. HLA-A2 supermotif
[0009] 3. HLA-A3 supermotif
[0010] 4. HLA-A24 supermotif
[0011] 5. HLA-B7 supernotif
[0012] 6. HLA-B27 supermotif
[0013] 7. HLA-B44 supermotif
[0014] 8. HLA-B58 supermotif
[0015] 9. HLA-B62 supermotif
[0016] 10. HLA-A1 motif
[0017] 11. HLA-A2.1 motif
[0018] 12. HLA-A3 motif
[0019] 13. HLA-A11 motif
[0020] 14. HLA-A24 motif
[0021] 15. HLA-DR-1-4-7 supermotif
[0022] 16. HLA-DR3 motifs

[0023] E. Enhancing Population Coverage of the Vaccine

[0024] F. Immune Response-Stimulating Peptide Epitope Analogs

[0025] G. Computer Screening of Protein Sequences from Disease-Related Antigens for Supermotif- or Motif-Containing Epitopes

[0026] H. Preparation of Peptide Epitopes

[0027] I. Assays to Detect T-Cell Responses

[0028] J. Use of Peptide Epitopes for Evaluating Immune Responses

[0029] K. Vaccine Compositions
[0030] 1. Minigene Vaccines
[0031] 2. Combinations of CTL Peptides with Helper Peptides

[0032] L. Administration of Vaccines for Therapeutic or Prophylactic Purposes

[0033] M. Kits

### V. Examples

### VI. Claims

### VII. Abstract

### I. BACKGROUND OF THE INVENTION

[0034] Hepatitis C virus (HCV) infection is a global human health problem with approximately 150,000 new reported cases each year in the U.S. alone. HCV is a single stranded RNA virus, and is the etiological agent identified in most cases of non-A, non-B post-transfusion and post-transplant hepatitis, and is a common cause of acute sporadic hepatitis (Choo et al., Science 244:359, 1989; Kuo et al., Science 244:362, 1989; and Alter et al., in: Current Perspective in Hepatology, p. 83, 1989). It is estimated that more than 50% of patients infected with HCV become chronically infected and, of those, 20% develop cirrhosis of the liver within 20 years (Davis et al., New Engl. J. Med. 321:1501, 1989; Alter et al., in: Current Perspective in Hepatology, p. 83, 1989; Alter et al., New Engl. J. Med. 327:1899, 1992; and Dienstag, J. L. Gastroenterology 85:430, 1983).

[0035] Moreover, the only therapy available for treatment of HCV infection is interferon-α. Most patients are unresponsive, however, and among the responders, there is a high recurrence rate within 6-12 months of cessation of treatment (Liang et al., J. Med. Virol. 40:69, 1993). Ribaviron, a guanosine analog with a broad spectrum activity against many RNA and DNA viruses, has been shown in clinical trials to be effective against chronic HCV infection when used in combination with interferon-α (see, e.g., Poynard et al., Lancet 352:1426-1432, 1998; Reichard et al., Lancet 351:83-87, 1998) However, the response rate is still well below 50%.

[0036] Virus-specific, human leukocyte antigen (HLA) class I-restricted cytotoxic T lymphocytes (CTL) are known to play a major role in the prevention and clearance of virus infections in vivo (Oldstone et al., Nature 321:239, 1989; Jamieson et al., J. Virol. 61:3930, 1987; Yap et al, Nature 273:238, 1978; Lukacher et al., J. Exp. Med. 160:814, 1994; McMichael et al., N. Engl. J. Med. 309:13, 1983; Sethi et al., J. Gen. Virol. 64:443, 1983; Watari et al., J. Exp. Med. 165:459, 1987; Yasukawa et al., J. Immunol. 143:2051, 1989; Tigges et al., J. Virol. 66:1622, 1993; Reddenhase et al., J. Virol. 55:263, 1985; Quinnan et al., N. Engl. J. Med. 307:6, 1982). HLA class I molecules are expressed on the surface of almost all nucleated cells. Following intracellular processing of antigens, epitopes from the antigens are presented as a complex with the HLA class I molecules on the surface of such cells. CTL recognize the peptide-HLA class I complex, which then results in the destruction of the cell bearing the HLA-peptide complex directly by the CTL and/or via the activation of non-destructive mechanisms e.g., the production of interferon, that inhibit viral replication.

[0037] In view of the heterogeneous immune response observed with HCV infection, induction of a multi-specific cellular immune response directed simultaneously against multiple HCV epitopes appears to be important for the development of an efficacious vaccine against HCV. There is a need, however, to establish vaccine embodiments that elicit immune responses that correspond to responses seen in patients that clear HCV infection.

[0038] The information provided in this section is intended to disclose the presently understood state of the art as of the filing date of the present application. Information is included in this section which was generated subsequent to the priority date of this application. Accordingly, information in this section is not intended, in any way, to delineate the priority date for the invention.

### II. SUMMARY OF THE INVENTION

[0039] This invention applies our knowledge of the mechanisms by which antigen is recognized by T cells, for example, to develop epitope-based vaccines directed towards HCV. More specifically, this application communicates our discovery of specific epitope pharmaceutical compositions and methods of use in the prevention and treatment of HCV infection.

[0040] Upon development of appropriate technology, the use of epitope-based vaccines has several advantages over current vaccines, particularly when compared to the use of whole antigens in vaccine compositions. There is evidence that the immune response to whole antigens is directed largely toward variable regions of the antigen, allowing for immune escape due to mutations. The epitopes for inclusion in an epitope-based vaccine are selected from conserved regions of viral or tumor-associated antigens, which thereby reduces the likelihood of escape mutants. Furthermore, immunosuppressive epitopes that may be present in whole antigens can be avoided with the use of epitope-based vaccines.

[0041] An additional advantage of an epitope-based vaccine approach is the ability to combine selected epitopes (CTL and HTL), and further, to modify the composition of the epitopes, achieving, for example, enhanced immunogenicity. Accordingly, the immune response can be modulated, as appropriate, for the target disease. Similar engineering of the response is not possible with traditional approaches.

[0042] Another major benefit of epitope-based immune-stimulating vaccines is their safety. The possible pathological side effects caused by infectious agents or whole protein antigens, which might have their own intrinsic biological activity, is eliminated.

[0043] An epitope-based vaccine also provides the ability to direct and focus an immune response to multiple selected antigens from the same pathogen. Thus, patient-by-patient variability in the immune response to a particular pathogen may be alleviated by inclusion of epitopes from multiple antigens from that pathogen in a vaccine composition. A “pathogen” may be an infectious agent or a tumor associated molecule.

[0044] One of the most formidable obstacles to the development of broadly efficacious epitope-based immunotherapeutics, however, has been the extreme polymorphism of HLA molecules. To date, effective non-genetically biased coverage of a population has been a task of considerable complexity; such coverage has required that epitopes be used that are specific for HLA molecules corresponding to each individual HLA allele, therefore, impractically large numbers of epitopes would have to be used in order to cover ethnically diverse populations. Thus, there has existed a need for peptide epitopes that are bound by multiple HLA antigen molecules for use in epitope-based vaccines. The greater the number of HLA antigen molecules bound, the greater the breadth of population coverage by the vaccine.

[0045] Furthermore, as described herein in greater detail, a need has existed to modulate peptide binding properties, for example, so that peptides that are able to bind to multiple HLA antigens do so with an affinity that will stimulate an immune response. Identification of epitopes restricted by more than one HLA allele at an affinity that correlates with immunogenicity is important to provide thorough population coverage, and to allow the elicitation of responses of sufficient vigor to prevent or clear an infection in a diverse segment of the population. Such a response can also target a broad array of epitopes. The technology disclosed herein provides for such favored immune responses.

[0046] In a preferred embodiment, epitopes for inclusion in vaccine compositions of the invention are selected by a process whereby protein sequences of known antigens are evaluated for the presence of motif or supermotif-bearing epitopes. Peptides corresponding to a motif- or supermotif-bearing epitope are then synthesized and tested for the ability to bind to the HLA molecule that recognizes the selected motif. Those peptides that bind at an intermediate or high affinity i.e., an IC₅₀ (or a K_{D} value) of 500 nM or less for HLA class I molecules or 1000 nM or less for HLA class II molecules, are further evaluated for their ability to induce a CTL or HTL response. Immunogenic peptide epitopes are selected for inclusion in vaccine compositions.

[0047] Supermotif-bearing peptides may additionally be tested for the ability to bind to multiple alleles within the HLA supertype family. Moreover, peptide epitopes may be analogued to modify binding affinity and/or the ability to bind to multiple alleles within an HLA supertype.

[0048] The invention also includes an embodiment comprising a method for monitoring or evaluating an immune response to HCV in a patient having a known HLA-type, the method comprising incubating a T lymphocyte sample from the patient with a peptide composition comprising an HCV epitope consisting essentially of an amino acid sequence described in Tables VII to Table XX or Table XXII which binds the product of at least one HLA allele present in said patient, and detecting for the presence of a T lymphocyte that binds to the peptide. A CTL peptide epitope may, for example, comprise a tetrameric complex.

[0049] An alternative modality for defining the peptide epitopes in accordance with the invention is to recite the physical properties, such as length; primary structure; or charge, which are correlated with binding to a particular allele-specific HLA molecule or group of allele-specific HLA molecules. A further modality for defining peptide epitopes is to recite the physical properties of an HLA binding pocket, or properties shared by several allele-specific HLA binding pockets (e.g. pocket configuration and charge distribution) and reciting that the peptide epitope fits and binds to said pocket or pockets.

[0050] As will be apparent from the discussion below, other methods and embodiments are also contemplated. Further, novel synthetic peptides produced by any of the methods described herein are also part of the invention.

### III. BRIEF DESCRIPTION OF THE FIGURES

[0051] FIG. 1: FIG. 1 provides a graph of total frequency of genotypes as a function of the number of HCV candidate epitopes bound by HLA-A and B molecules, in an average population.

[0052] FIG. 2: FIG. 2 illustrates the position of peptide epitopes in an experimental model minigene construct.

### IV. DETAILED DESCRIPTION OF THE INVENTION

[0053] The peptide epitopes and corresponding nucleic acid compositions of the present invention are useful for stimulating an immune response to HCV by stimulating the production of CTL or HTL responses. The peptide epitopes, which are derived directly or indirectly from native HCV amino acid sequences, are able to bind to HLA molecules and stimulate an immune response to HCV. The complete polyprotein sequence from HCV and its variants can be obtained from Genbank. Peptide epitopes and analogs thereof can also be readily determined from sequence information that may subsequently be discovered for heretofore unknown variants of HCV, as will be clear from the disclosure provided below.

[0054] The peptide epitopes of the invention have been identified in a number of ways, as will be discussed below. Also discussed in greater detail is that analog peptides have been derived and the binding activity for HLA molecules modulated by modifying specific amino acid residues to create peptide analogs exhibiting altered immunogenicity. Further, the present invention provides compositions and combinations of compositions that enable epitope-based vaccines that are capable of interacting with HLA molecules encoded by various genetic alleles to provide broader population coverage than prior vaccines.

### IV.A. Definitions

[0055] The invention can be better understood with reference to the following definitions, which are listed alphabetically:

[0056] A “computer” or “computer system” generally includes: a processor; at least one information storage/retrieval apparatus such as, for example, a hard drive, a disk drive or a tape drive; at least one input apparatus such as, for example, a keyboard, a mouse, a touch screen, or a microphone; and display structure. Additionally, the computer may include a communication channel in communication with a network. Such a computer may include more or less than what is listed above.

[0057] “Cross-reactive binding” indicates that a peptide is bound by more than one HLA molecule; a synonym is degenerate binding.

[0058] A “cryptic epitope” elicits a response by immunization with an isolated peptide, but the response is not cross-reactive in vitro when intact whole protein which comprises the epitope is used as an antigen.

[0059] A “dominant epitope” is an epitope that induces an immune response upon immunization with a whole native antigen (see, e.g., Sercarz, et al., Annu. Rev. Immunol. 11:729-766, 1993). Such a response is cross-reactive in vitro with an isolated peptide epitope.

[0060] With regard to a particular amino acid sequence, an “epitope” is a set of amino acid residues which is involved in recognition by a particular immunoglobulin, or in the context of T cells, those residues necessary for recognition by T cell receptor proteins and/or Major Histocompatibility Complex (MHC) receptors. In an immune system setting, in vivo or in vitro, an epitope is the collective features of a molecule, such as primary, secondary and tertiary peptide structure, and charge, that together form a site recognized by an immunoglobulin, T cell receptor or HLA molecule. Throughout this disclosure epitope and peptide are often used interchangeably. It is to be appreciated, however, that isolated or purified protein or peptide molecules larger than and comprising an epitope of the invention are still within the bounds of the invention.

[0061] “Human Leukocyte Antigen” or “HLA” is a human class I or class II Major Histocompatibility Complex. (MHC) protein (see, e.g., Stites, et al., IMMUNOLOGY, 8^{TH} ED., Lange Publishing, Los Altos, Calif. (1994).

[0062] An “HLA supertype or family”, as used herein, describes sets of HLA molecules grouped on the basis of shared peptide-binding specificities. HLA class I molecules that share somewhat similar binding affinity for peptides bearing certain amino acid motifs are grouped into HLA supertypes. The terms HLA superfamily, HLA supertype family, HLA family, and HLA xx-like supertype molecules (where xx denotes a particular HLA type), are synonyms.

[0063] Throughout this disclosure, results are expressed in terms of “IC₅₀ 's.” IC₅₀ is the concentration of peptide in a binding assay at which 50% inhibition of binding of a reference peptide is observed. Given the conditions in which the assays are run (i.e., limiting HLA proteins and labeled peptide concentrations), these values approximate K_{D} values. It should be noted that IC₅₀ values can change, often dramatically, if the assay conditions are varied, and depending on the particular reagents used (e.g., HLA preparation, etc.). For example, excessive concentrations of HLA molecules will increase the apparent measured IC₅₀ of a given ligand.

[0064] Assays for determining binding are described in detail, e.g., in PCT publications WO 94/20127 and WO 94/03205. Alternatively, binding is expressed relative to a reference peptide. As a particular assay becomes more, or less, sensitive, the IC₅₀'s of the peptides tested may change somewhat. However, the binding relative to the reference peptide will not significantly change. For example, in an assay run under conditions such that the IC₅₀ of the reference peptide increases 10-fold, the IC₅₀ values of the test peptides will also shift approximately 10-fold. Therefore, to avoid ambiguities, the assessment of whether a peptide is a good, intermediate, weak, or negative binder is generally based on its IC₅₀, relative to the IC₅₀ of a standard peptide.

[0065] Binding may also be determined using other assay systems including those using: live cells (e.g., Ceppellini et al., Nature 339:392, 1989; Christnick et al, Nature 352:67, 1991; Busch et al., Int. Immunol. 2:443, 19990; Hill et al., J. Immunol. 147:189, 1991; del Guercio et al., J. Immunol. 154:685, 1995), cell free systems using detergent lysates (e.g., Cerundolo et al., J. Immunol. 21:2069, 1991), immobilized purified MHC (e.g., Hill et al., J. Immunol. 152, 2890, 1994; Marshall et al., J. Immunol. 152:4946, 1994), ELISA systems (e.g., Reay et al., EMBO J. 11:2829, 1992), surface plasmon resonance (e.g., Khilko et al., J. Biol. Chem. 268:15425, 1993); high flux soluble phase assays (Hammer et al., J. Exp. Med. 180:2353, 1994), and measurement of class I MHC stabilization or assembly (e.g., Ljunggren et al., Nature 346:476, 1990; Schumacher et al., Cell 62:563, 1990; Townsend et al., Cell 62:285, 1990; Parker et al., J. Immunol. 149:1896, 1992).

[0066] As used herein, “high affinity” with respect to HLA class I molecules is defined as binding with an IC₅₀, or K_{D} value, of 50 nM or less; “intermediate affinity” is binding with an IC₅₀ or K_{D} value of between about 50 and about 500 nM. “High affinity” with respect to binding to HLA class II molecules is defined as binding with an IC₅₀ or K_{D} value of 100 nM or less; “intermediate affinity” is binding with an IC₅₀ or K_{D} value of between about 100 and about 1000 nM.

[0067] The terms “identical” or percent “identity,” in the context of two or more peptide sequences, refer to two or more sequences or subsequences that are the same or have a specified percentage of amino acid residues that are the same, when compared and aligned for maximum correspondence over a comparison window, as measured using a sequence comparison algorithm or by manual alignment and visual inspection.

[0068] An “immunogenic peptide” or “peptide epitope” is a peptide that comprises an allele-specific motif or supermotif such that the peptide will bind an HLA molecule and induce a CTL and/or HTL response. Thus, immunogenic peptides of the invention are capable of binding to an appropriate HLA molecule and thereafter inducing a cytotoxic T cell response, or a helper T cell response, to the antigen from which the immunogenic peptide is derived.

[0069] The phrases “isolated” or “biologically pure” refer to material which is substantially or essentially free from components which normally accompany the material as it is found in its native state. Thus, isolated peptides in accordance with the invention preferably do not contain materials normally associated with the peptides in their in situ environment.

[0070] “Major Histocompatibility Complex” or “MHC” is a cluster of genes that plays a role in control of the cellular interactions responsible for physiologic immune responses. In humans, the MHC complex is also known as the HLA complex. For a detailed description of the MHC and HLA complexes, see, Paul, FUNDAMENTAL IMMUNOLOGY, 3^{RD}ED., Raven Press, New York, 1993.

[0071] The term “motif” refers to the pattern of residues in a peptide of defined length, usually a peptide of from about 8 to about 13 amino acids for a class I HLA motif and from about 6 to about 25 amino acids for a class II HLA motif, which is recognized by a particular HLA molecule. Peptide motifs are typically different for each protein encoded by each human HLA allele and differ in the pattern of the primary and secondary anchor residues.

[0072] A “negative binding residue” is an amino acid which, if present at certain positions (typically not primary anchor positions) in a peptide epitope, results in decreased binding affinity of the peptide for the peptide's corresponding HLA molecule.

[0073] The term “peptide” is used interchangeably with “oligopeptide” in the present specification to designate a series of residues, typically L-amino acids, connected one to the other, typically by peptide bonds between the α-amino and carboxyl groups of adjacent amino acids. The preferred CTL-inducing peptides of the invention are 13 residues or less in length and usually consist of between about 8 and about 11 residues, preferably 9 or 10 residues. The preferred HTL-inducing oligopeptides are less than about 50 residues in length and usually consist of between about 6 and about 30 residues, more usually between about 12 and 25, and often between about 15 and 20 residues.

[0074] “Pharmaceutically acceptable” refers to a non-toxic, inert, and physiologically compatible composition.

[0075] A “primary anchor residue” is an amino acid at a specific position along a peptide sequence which is understood to provide a contact point between the immunogenic peptide and the HLA molecule. One to three, usually two, primary anchor residues within a peptide of defined length generally defines a “motif” for an immunogenic peptide. These residues are understood to fit in close contact with peptide binding grooves of an HLA molecule, with their side chains buried in specific pockets of the binding grooves themselves. In one embodiment, the primary anchor residues are located at position 2 (from the amino terminal position) and at the carboxyl terminal position of a 9-residue peptide epitope in accordance with the invention. The primary anchor positions for each motif and supermotif are set forth in Table 1. For example, analog peptides can be created by altering the presence or absence of particular residues in these primary anchor positions. Such analogs are used to modulate the binding affinity of a peptide comprising a particular motif or supermotif.

[0076] “Promiscuous recognition” is where a distinct peptide is recognized by the same T cell clone in the context of various HLA molecules. Promiscuous recognition or binding is synonymous with cross-reactive binding.

[0077] A “protective immune response” or “therapeutic immune response” refers to a CTL and/or an HTL response to an antigen derived from an infectious agent or a tumor antigen, which prevents or at least partially arrests disease symptoms or progression. The immune response may also include an antibody response which has been facilitated by the stimulation of helper T cells.

[0078] The term “residue” refers to an amino acid or amino acid mimetic incorporated into an oligopeptide by an amide bond or amide bond mimetic.

[0079] A “secondary anchor residue” is an amino acid at a position other than a primary anchor position in a peptide which may influence peptide binding. A secondary anchor residue occurs at a significantly higher frequency amongst bound peptides than would be expected by random distribution of amino acids at one position. The secondary anchor residues are said to occur at “secondary anchor positions.” A secondary anchor residue can be identified as a residue which is present at a higher frequency among high or intermediate affinity binding peptides, or a residue otherwise associated with high or intermediate affinity binding. For example, analog peptides can be created by altering the presence or absence of particular residues in these secondary anchor positions. Such analogs are used to finely modulate the binding affinity of a peptide comprising a particular motif or supermotif.

[0080] A “subdominant epitope” is an epitope which evokes little or no response upon immunization with whole antigens which comprise the epitope, but for which a response can be obtained by immunization with an isolated peptide, and this response (unlike the case of cryptic epitopes) is detected when whole protein is used to recall the response in vitro or in vivo.

[0081] A “supermotif” is a peptide binding specificity shared by HLA molecules encoded by two or more HLA alleles. Preferably, a supermotif-bearing peptide is recognized with high or intermediate affinity (as defined herein) by two or more HLA antigens.

[0082] “Synthetic peptide” refers to a peptide that is not naturally occurring, but is man-made using such methods as chemical synthesis or recombinant DNA technology.

[0083] The nomenclature used to describe peptide compounds follows the conventional practice wherein the amino group is presented to the left (the N-terminus) and the carboxyl group to the right (the C-terminus) of each amino acid residue. When amino acid residue positions are referred to in a peptide epitope they are numbered in an amino to carboxyl direction with position one being the position closest to the amino terminal end of the epitope, or the peptide or protein of which it may be a part. In the formulae representing selected specific embodiments of the present invention, the amino- and carboxyl-terminal groups, although not specifically shown, are in the form they would assume at physiologic pH values, unless otherwise specified. In the amino acid structure formulae, each residue is generally represented by standard three letter or single letter designations. The L-form of an amino acid residue is represented by a capital single letter or a capital first letter of a three-letter symbol, and the D-form for those amino acids having D-forms is represented by a lower case single letter or a lower case three letter symbol. Glycine has no asymmetric carbon atom and is simply referred to as “Gly” or G. Symbols for the amino acids are shown below.

| Single Letter Symbol | Three Letter Symbol | Amino Acids |
|---|---|---|
| A | Ala | Alanine |
| C | Cys | Cysteine |
| D | Asp | Aspartic Acid |
| E | Glu | Glutamic Acid |
| F | Phe | Phenylalanine |
| G | Gly | Glycine |
| H | His | Histidine |
| I | Ile | Isoleucine |
| K | Lys | Lysine |
| L | Leu | Leucine |
| M | Met | Methionine |
| N | Asn | Asparagine |
| P | Pro | Proline |
| Q | Gln | Glutamine |
| R | Arg | Arginine |
| S | Ser | Serine |
| T | Thr | Threonine |
| V | Val | Valine |
| W | Trp | Tryptophan |
| Y | Tyr | Tyrosine |

### IV.B. Stimulation of CTL and HTL Responses

[0084] The mechanism by which T cells recognize antigens has been delineated during the past ten years. Based on our understanding of the immune system we have developed efficacious peptide epitope vaccine compositions that can induce a therapeutic or prophylactic immune response to HCV in a broad population. For an understanding of the value and efficacy of the claimed compositions, a brief review of immunology-related technology is provided.

[0085] A complex of an HLA molecule and a peptidic antigen acts as the ligand recognized by HLA-restricted T cells (Buus, S. et al., Cell 47:1071, 1986; Babbitt, B. P. et al., Nature 317:359, 1985; Townsend, A. and Bodmer, H., Annu. Rev. Immunol. 7:601, 1989; Germain, R. N., Annu. Rev. Immunol. 11:403, 1993). Through the study of single amino acid substituted antigen analogs and the sequencing of endogenously bound, naturally processed peptides, critical residues that correspond to motifs required for specific binding to HLA antigen molecules have been identified and are described herein and are set forth in Tables I, II, and III (see also, e.g., Southwood, et al., J. Immunol. 160:3363, 1998; Rammensee, et al., Immunogenetics 41:178, 1995; Rammensee et al., SYFPEITHI, access via web at: http://134.2.96.221/scripts.hlaserver.dll/home.htm; Sette, A. and Sidney, J. Curr. Opin. Immunol. 10:478, 1998; Engelhard, V. H., Curr. Opin. Immunol. 6:13, 1994; Sette, A. and Grey, H. M., Curr. Opin. Immunol. 4:79, 1992; Sinigaglia, F. and Hamrner, J. Curr. Biol. 6:52, 1994; Ruppert et al., Cell 74:929-937, 1993; Kondo et al., J. Immunol. 155:4307-4312, 1995; Sidney et al., J. Immunol. 157:3480-3490, 1996; Sidney et al., Human Immunol. 45:79-93, 1996; Sette, A. and Sidney, J. Immunogenetics, in press, 1999).

[0086] Furthermore, x-ray crystallographic analysis of HLA-peptide complexes has revealed pockets within the peptide binding cleft of HLA molecules which accommodate, in an allele-specific mode, residues borne by peptide ligands; these residues in turn determine the HLA binding capacity of the peptides in which they are present. (See, e.g., Madden, D. R. Annu. Rev. Immunol. 13:587, 1995; Smith, et al., Immunity 4:203, 1996; Fremont et al., Immunity 8:305, 1998; Stem et al., Structure 2:245, 1994; Jones, E. Y. Curr. Opin. Immunol. 9:75, 1997; Brown, J. H. et al., Nature 364:33, 1993; Guo, H. C. et al., Proc. Natl. Acad. Sci. USA 90:8053, 1993; Guo, H. C. et al., Nature 360:364, 1992; Silver, M. L. et al., Nature 360:367, 1992; Matsumura, M. et al., Science 257:927, 1992; Madden et al., Cell 70:1035, 1992; Fremont, D. H. et al., Science 257:919, 1992; Saper, M. A., Bjorkman, P. J. and Wiley, D. C., J. Mol. Biol. 219:277, 1991.)

[0087] Accordingly, the definition of class I and class II allele-specific HLA binding motifs, or class I or class II supermotifs allows identification of regions within a protein that have the potential of binding particular HLA antigen(s).

[0088] The present inventors have found that the correlation of binding affinity with immunogenicity, which is disclosed herein, is an important factor to be considered when evaluating candidate peptides. Thus, by a combination of motif searches and HLA-peptide binding assays, candidates for epitope-based vaccines have been identified. After determining their binding affinity, additional confirmatory work can be performed to select, amongst these vaccine candidates, epitopes with preferred characteristics in terms of population coverage, antigenicity, and immunogenicity.

[0089] Various strategies can be utilized to evaluate immunogenicity, including:

[0090] 1) Evaluation of primary T cell cultures from normal individuals (see, e.g., Wentworth, P. A. et al., Mol. Jmmunol. 32:603, 1995; Celis, E. et al., Proc. Natl. Acad. Sci. USA 91:2105, 1994; Tsai, V. et al., J. Immunol. 158:1796, 1997; Kawashima, I. et al., Human Immunol. 59:1, 1998); This procedure involves the stimulation of peripheral blood lymphocytes (PBL) from normal subjects with a test peptide in the presence of antigen presenting cells in vitro over a period of several weeks. T cells specific for the peptide become activated during this time and are detected using, e.g., a ⁵¹Cr-release assay involving peptide sensitized target cells.

[0091] 2) Immunization of HLA transgenic mice (see, e.g., Wentworth, P. A. et al., J. Immunol. 26:97, 1996; Wentworth, P. A. et al., Int. Immunol. 8:651, 1996; Alexander, J. et al., J. Immunol. 159:4753, 1997); In this method, peptides in incomplete Freund's adjuvant are administered subcutaneously to HLA transgenic mice. Several weeks following immunization, splenocytes are removed and cultured in vitro in the presence of test peptide for approximately one week. Peptide-specific T cells are detected using, e.g., a ⁵¹Cr-release assay involving peptide sensitized target cells and target cells expressing endogenously generated antigen.

[0092] 3) Demonstration of recall T cell responses from immune individuals who have effectively been vaccinated, recovered from infection, and/or from chronically infected patients (see, e.g., Rehermann, B. et al., J. Exp. Med. 181:1047, 1995; Doolan, D. L. et al., Immunity 7:97, 1997; Bertoni, R. et al., J. Clin. Invest. 100:503, 1997; Threlkeld, S. C. et al., J. Immunol. 159:1648, 1997; Diepolder, H. M. et al., J. Virol. 71:6011, 1997). In applying this strategy, recall responses are detected by culturing PBL from subjects that have been naturally exposed to the antigen, for instance through infection, and thus have generated an immune response “naturally”, or from patients who were vaccinated against the infection. PBL from subjects are cultured in vitro for 1-2 weeks in the presence of test peptide plus antigen presenting cells. (APC) to allow activation of “memory” T cells, as compared to “naive” T cells. At the end of the culture period, T cell activity is detected using assays for T cell activity including ⁵¹Cr release involving peptide-sensitized targets, T cell proliferation, or lymphokine release.

[0093] The following describes the peptide epitopes and corresponding nucleic acids of the invention.

### IV.C. Binding Affinity of Peptide Epitopes for HLA Molecules

[0094] As indicated herein, the large degree of HLA polymorphism is an important factor to be taken into account with the epitope-based approach to vaccine development. To address this factor, epitope selection encompassing identification of peptides capable of binding at high or intermediate affinity to multiple HLA molecules is preferably utilized, most preferably these epitopes bind at high or intermediate affinity to two or more allele specific HLA molecules.

[0095] CTL-inducing peptides of interest for vaccine compositions preferably include those that have an IC₅₀ or binding affinity value for class I HLA molecules of 500 nM or better (i.e., the value is ≧500 nM). HTL-inducing peptides preferably include those that have an IC₅₀ or binding affinity value for class II HLA molecules of 1000 nM or better, (i.e., the value is ≧1,000 nM). For example, peptide binding is assessed by testing the capacity of a candidate peptide to bind to a purified HLA molecule in vitro. Peptides exhibiting high or intermediate affinity are then considered for further analysis. Selected peptides are tested on other members of the supertype family. In preferred embodiments, peptides that exhibit cross-reactive binding are then used in vaccines or in cellular screening analyses.

[0096] As disclosed herein, higher HLA binding affinity is correlated with greater immunogenicity. Greater immunogenicity can be manifested in several different ways. Immunogenicity corresponds to whether an immune response is elicited at all, and to the vigor of any particular response, as well as to the extent of a population in which a response is elicited. For example, a peptide might elicit an immune response in a diverse array of the population, yet in no instance produce a vigorous response. In accordance with these principles, close to 90% of high binding peptides have been found to be immunogenic, as contrasted with about 50% of the peptides which bind with intermediate affinity. Moreover, higher binding affinity peptides leads to more vigorous immunogenic responses. As a result, less peptide is required to elicit a similar biological effect if a high affinity binding peptide is used. Thus, in preferred embodiments of the invention, high affinity binding epitopes are particularly useful.

[0097] The relationship between binding affinity for HLA class I molecules and immunogenicity of discrete peptide epitopes on bound antigens has been determined for the first time in the art by the present inventors. The correlation between binding affinity and immunogenicity was analyzed in two different experimental approaches (see, e.g., Sette, et al., J. Immunol. 153:5586-5592, 1994). In the first approach, the immunogenicity of potential epitopes ranging in HLA binding affinity over a 10,000-fold range was analyzed in HLA-A*0201 transgenic mice. In the second approach, the antigenicity of approximately 100 different hepatitis B virus (HBV)-derived potential epitopes, all carrying A*0201 binding motifs, was assessed by using PBL from acute hepatitis patients. Pursuant to these approaches, it was determined that an affinity threshold value of approximately 500 nM (preferably 50 nM or less) determines the capacity of a peptide epitope to elicit a CTL response. These data are true for class I binding affinity measurements for naturally processed peptides and for synthesized T cell epitopes. These data also indicate the important role of determinant selection in the shaping of T cell responses (see, e.g., Schaeffer et al. Proc. Natl. Acad. Sci. USA 86:4649-4653, 1989).

[0098] An affinity threshold associated with immunogenicity in the context of HLA class II DR molecules has also been delineated (see, e.g., Southwood et al. J. Immunology 160:3363-3373, 1998, and U.S. Ser. No. 60/087,192 filed May 29, 1998). In order to define a biologically significant threshold of DR binding affinity, a database of the binding affinities of 32 DR-restricted epitopes for their restricting element (i.e., the HLA molecule that binds the motif) was compiled. In approximately half of the cases (15 of 32 epitopes), DR restriction was associated with high binding affinities, i.e. binding affinity values of 100 nM or less. In the other half of the cases (16 of 32), DR restriction was associated with intermediate affinity (binding affinity values in the 100-1000 nM range). In only one of 32 cases was DR restriction associated with an IC₅₀ of 1000 nM or greater. Thus, 1000 nM can be defined as an affinity threshold associated with immunogenicity in the context of DR molecules.

[0099] The binding affinity of peptides for HLA molecules can be determined as described in Example 1, below.

### IV.D. Peptide Epitope Binding Motifs and Supermotifs

[0100] In the past few years evidence has accumulated to demonstrate that a large fraction of HLA class I and class II molecules can be classified into a relatively few supertypes, each characterized by largely overlapping peptide binding repertoires, and consensus structures of the main peptide binding pockets.

[0101] For HLA molecule pocket analyses, the residues comprising the B and F pockets of HLA class I molecules as described in crystallographic studies were analyzed (see, e.g., Guo, H. C. et al., Nature 360:364, 1992; Saper, M. A., Bjorkman, P. J. and Wiley, D. C., J. Mol. Biol. 219:277, 1991; Madden, D. R., Garboczi, D. N. and Wiley, D. C., Cell 75:693, 1993; Parham, P., Adams, E. J., and Arnett, K. L., Immunol. Rev. 143:141, 1995). In these analyses, residues 9, 45, 63, 66, 67, 70, and 99 were considered to make up the B pocket; and the B pocket was deemed to determine the specificity for the amino acid residue in the second position of peptide ligands. Similarly, residues 77, 80, 81, and 116 were considered to determine the specificity of the F pocket; the F pocket was deemed to determine the specificity for the C-terminal residue of a peptide ligand bound by the HLA class I molecule.

[0102] Through the study of single amino acid substituted antigen analogs and the sequencing of endogenously bound, naturally processed peptides, critical residues required for allele-specific binding to HLA molecules have been identified. The presence of these residues correlates with binding affinity for HLA molecules. The identification of motifs and/or supermotifs that correlate with high and intermediate affinity binding is an important issue with respect to the identification of immunogenic peptide epitopes for the inclusion in a vaccine. Kast et al. (J. Immunol. 152:3904-3912, 1994) have shown that motif-bearing peptides account for 90% of the epitopes that bind to allele-specific HLA class I molecules. In this study all possible peptides of 9 amino acids in length and overlapping by eight amino acids (240 peptides), which cover the entire sequence of the E6 and E7 proteins of human papillomavirus type 16, were evaluated for binding to five allele-specific HLA molecules that are expressed at high frequency among different ethnic groups. This unbiased set of peptides allowed an evaluation of the predictive value of HLA class I motifs. From the set of 240 peptides, 22 peptides were identified that bound to an allele-specific HLA molecule with high or intermediate affinity. Of these 22 peptides, 20 (i.e. 91%) were motif-bearing. Thus, this study demonstrates the value of motifs for the identification of peptide epitopes for inclusion in a vaccine: application of motif-based identification techniques eliminates screening of 90% of the potential epitopes in a target antigen protein sequence.

[0103] Such peptide epitopes are identified in the Tables described below.

[0104] Peptides of the present invention may also comprise epitopes that bind to MHC class II DR molecules. A greater degree of heterogeneity in both size and binding frame position of the motif, relative to the N and C termini of the peptide, exists for class II peptide ligands. This increased heterogeneity of HLA class II peptide ligands is due to the structure of the binding groove of the HLA class II molecule which, unlike its class I counterpart, is open at both ends. Crystallographic analysis of HLA class II DRB*0101-peptide complexes showed that the major energy of binding is contributed by peptide residues complexed with complementary pockets on the DRB*0101 molecules. An important anchor residue engages the deepest hydrophobic pocket (see, e.g., Madden, D. R. Ann. Rev. Immunol. 13:587, 1995) and is referred to as position 1 (P1). P1 may represent the N-terminal residue of a class II binding peptide epitope, but more typically is flanked towards the N-terminus by one or more residues. Other studies have also pointed to an important role for the peptide residue in the 6^{th} position towards the C-terminus, relative to P1, for binding to various DR molecules.

[0105] Thus, peptides of the present invention are identified by any one of several HLA-specific amino acid motifs (see, e.g., Tables I-III). If the presence of the motif corresponds to the ability to bind several allele-specific HLA antigens, it is referred to as a supermotif. The HLA molecules that bind to peptides that possess a particular amino acid supermotif are collectively referred to as an HLA “supertype.”

[0106] The peptide motifs and supermotifs described below, and summnarized in Tables I-III, provide guidance for the identification and use of peptide epitopes in accordance with the invention.

[0107] Examples of peptide epitopes bearing a respective supermotif or motif are included in Tables as designated in the description of each motif or supermotif below. The Tables include a binding affinity ratio listing for some of the peptide epitopes. The ratio may be converted to IC₅₀ by using the following formula: IC₅₀ of the standard peptide/ratio=IC₅₀ of the test peptide (i.e., the peptide epitope). The IC₅₀ values of standard peptides used to determine binding affinities for Class I peptides are shown in Table IV. The IC₅₀ values of standard peptides used to determine binding affinities for Class II peptides are shown in Table V. The peptides used as standards for the binding assays described herein are examples of standards; alternative standard peptides can also be used when performing such an analysis.

[0108] To obtain the peptide epitope sequences listed in each Table, protein sequence data from fourteen HCV isolates were evaluated for the presence of the designated supermotif or motif. The fourteen strains include HPCCGAA, HPCPLYPRE, HCV-H-CMR, HCV-J1, HPCGENANTI, HPCGENOM, HPCHUMR, HPCJCG, HPCJTA, HCV-J483, HCV-JK1, HCV-N, HPCPOLP, and HCV-J8. Peptide epitopes were additionally evaluated on the basis of their conservancy among these fourteen strains. A criterion for conservancy requires that the entire sequence of an HLA class I binding peptide be totally conserved in 79% of the sequences available for a specific protein. Similarly, a criterion for conservancy requires that the entire 9-mer core region of an HLA class II binding peptide be totally conserved in 79% of the sequences available for a specific protein. The percent conservancy of the selected peptide epitopes is indicated on the Tables. The frequency, i.e. the number of strains of the fourteen strains in which the totally conserved peptide sequence was identified, is also shown. The “position” column in the Tables designates the amino acid position of the HCV polyprotein that corresponds to the first amino acid residue of the epitope. The “number of amino acids” indicates the number of residues in the epitope sequence.

### HLA Class I Motifs Indicative of CTL Inducing Peptide Epitopes:

[0109] The primary anchor residues of the HLA class I peptide-epitope supermotifs and motifs delineated below are summarized in Table I. The HLA class I motifs set out in Table I(a) are those most particularly relevant to the invention claimed here. Primary and secondary anchor positions are summarized in Table II. Allele-specific HLA molecules that comprise HLA class I supertype families are listed in Table VI.

### IV.D.1. HLA-A1 Supermotif

[0110] The HLA-A 1 supermotif is characterized by the presence in peptide ligands of a small (T or S) or hydrophobic (L, I, V, or M) primary anchor residue in position 2, and an aromatic (Y, F, or W) primary anchor residue at the C-terminal position of the epitope. The corresponding family of HLA molecules that bind to the A1 supermotif (i.e., the HLA-A1 supertype) is comprised of at least A*0101, A*2601, A*2602, A*2501, and A*3201 (see, e.g., DiBrino, M. et al., J. Immunol. 151:5930, 1993; DiBrino, M. et al., J. Immunol. 152:620, 1994; Kondo, A. et al., Immunogenetics 45:249, 1997). Other allele-specific HLA molecules predicted to be members of the A1 superfamily are shown in Table VI. Peptides binding to each of the individual HLA proteins can be modulated by substitutions at primary and/or secondary anchor positions, preferably choosing respective residues specified for the supermotif.

[0111] Representative peptide epitopes that comprise the A1 supermotif are set forth on the attached Table VII.

### IV.D.2. HLA-A2 Supermotif

[0112] Primary anchor specificities for allele-specific HLA-A2.1 molecules (Falk et al., Nature 351:290-296, 1991; Hunt et al., Science 255:1261-1263, 1992; Parker et al., J. Immunol. 149:3580-3587, 1992) and cross-reactive binding within the HLA A2 family (Fruci et al., Human Immunol. 38:187-192, 1993; Tanigaki et al., Human Immunol. 39:155-162, 1994) have been described. The present inventors have defined additional primary anchor residues that determine cross-reactive binding to multiple allele-specific HLA A2 molecules (Ruppert et al., Cell 74:929-937, 1993; Del Guercio et al., J. Immunol. 154:685-693, 1995; Kast et al., J. Immunol. 152:3904-3912, 1994). The HLA-A2 supermotif comprises peptide ligands with L, I, V, M, A, T, or Q as a primary anchor residue at position 2 and L, I, V, M, A, or T as a primary anchor residue at the C-terminal position of the epitope.

[0113] The corresponding family of HLA molecules (i.e., the HLA-A2 supertype that binds these peptides) is comprised of at least: A*0201, A*0202, A*0203, A*0204, A*0205, A*0206, A*0207, A*0209, A*0214, A*6802, and A*6901. Other allele-specific HLA molecules predicted to be members of the A2 superfamily are shown in Table VI. As explained in detail below, binding to each of the individual allele-specific HLA molecules can be modulated by substitutions at the primary anchor and/or secondary anchor positions, preferably choosing respective residues specified for the supermotif.

[0114] Representative peptide epitopes that comprise an A2 supermotif are set forth on the attached Table VIII. The motifs comprising the primary anchor residues V, A, T, or Q at position 2 and L, I, V, A, or T at the C-terminal position are those most particularly relevant to the invention claimed herein.

### IV.D.3. HLA-A3 Supermotif

[0115] The HLA-A3 supermotif is characterized by the presence in peptide ligands of A, L, I, V, M, S, or, T as a primary anchor at position 2, and a positively charged residue, R or K, at the C-terminal position of the epitope (e.g., in position 9 of 9-mers). Exemplary members of the corresponding family of HLA molecules (the HLA-A3 supertype) that bind the A3 supermotif include at least A*0301, A*1101, A*3101, A*3301, and A*6801. Other allele-specific HLA molecules predicted to be members of the A3 superfamily are shown in Table VI. As explained in detail below, peptide binding to each of the individual allele-specific HLA proteins can be modulated by substitutions of amino acids at the primary and/or secondary anchor positions of the peptide, preferably choosing respective residues specified for the supermotif.

[0116] Representative peptide epitopes that comprise the A3 supermotif are set forth on the attached Table IX.

### IV.D.4. HLA-A24 Supermotif

[0117] The HLA-A24 supermotif is characterized by the presence in peptide ligands of an aromatic (F, W, or Y) or hydrophobic aliphatic (L, I, V, M, or T) residue as a primary anchor in position 2, and Y, F, W, L, I, or M as primary anchor at the C-terminal position of the epitope. The corresponding family of HLA molecules that bind to the A24 supermotif (i.e., the A24 supertype) includes at least A*2402, A*3001, and A*2301. Other allele-specific HLA molecules predicted to be members of the A24 superfamily are shown in Table VI. Peptide binding to each of the allele-specific HLA molecules can be modulated by substitutions at primary and/or secondary anchor positions, preferably choosing respective residues specified for the supermotif.

[0118] Representative peptide epitopes that comprise the A24 supermotif are set forth on the attached Table X.

### IV.D.5. HLA-B7 Supermotif

[0119] The HLA-B7 supermotif is characterized by peptides bearing proline in position 2 as a primary anchor, and a hydrophobic or aliphatic amino acid (L, I, V, M, A, F, W, or Y) as the primary anchor at the C-terminal position of the epitope. The corresponding family of HLA molecules that bind the B7 supermotif (i.e., the HLA-B7 supertype) is comprised of at least twenty six HLA-B proteins including: B*0702, B*0703, B*0704, B*0705, B*1508, B*3501, B*3502, B*3503, B*3504, B*3505, B*3506, B*3507, B*3508, B*5101, B*5102, B*5103, B*5104, B*5105, B*5301, B*5401, B*5501, B*5502, B*5601, B*5602, B*6701, and B*7801 (see, e.g., Sidney, et al., J. Immunol. 154:247, 1995; Barber, et al., Curr. Biol. 5:179, 1995; Hill, et al., Nature 360:434, 1992; Rammensee, et al., Immunogenetics 41:178, 1995). Other allele-specific HLA molecules predicted to be members of the B7 superfamily are shown in Table VI. As explained in detail below, peptide binding to each of the individual allele-specific HLA proteins can be modulated by substitutions at the primary and/or secondary anchor positions of the peptide, preferably choosing respective residues specified for the supermotif.

[0120] Representative peptide epitopes that comprise the B7 supermotif are set forth on the attached Table XI.

### IV.D.6. HLA-B27 Supermotif

[0121] The HLA-B27 supermotif is characterized by the presence in peptide ligands of a positively charged (R, H, or K) residue as a primary anchor at position 2, and a hydrophobic (F, Y, L, W, M, I, A, or V) residue as a primary anchor at the C-terminal position of the epitope. Exemplary members of the corresponding family of HLA molecules that bind to the B27 supermotif (i.e., the B27 supertype) include at least B*1401, B*1402, B*1509, B*2702, B*2703, B*2704, B*2705, B*2706, B*3801, B*3901, B*3902, and B*7301. Other allele-specific HLA molecules predicted to be members of the B27 superfamily are shown in Table VI. Peptide binding to each of the allele-specific HLA molecules can be modulated by substitutions at primary and/or secondary anchor positions, preferably choosing respective residues specified for the supermotif.

[0122] Representative peptide epitopes that comprise the B27 supermotif are set forth on the attached Table XII.

### IV.D.7. HLA-B44 Supermotif

[0123] The HLA-B44 supermotif is characterized by the presence in peptide ligands of negatively charged (D or E) residues as a primary anchor in position 2, and hydrophobic residues (F, W, Y, L, I, M, V, or A) as a primary anchor at the C-terminal position of the epitope. Exemplary members of the corresponding family of HLA molecules that bind to the B44 supermotif (i.e., the B44 supertype) include at least: B*1801, B*1802, B*3701, B*4001, B*4002, B*4006, B*4402, B*4403, and B*4006. Peptide binding to each of the allele-specific HLA molecules can be modulated by substitutions at primary and/or secondary anchor positions; preferably choosing respective residues specified for the supermotif.

### IV.D.8. HLA-B58 Supermotif

[0124] The HLA-B58 supermotif is characterized by the presence in peptide ligands of a small aliphatic residue (A, S, or T) as a primary anchor residue at position 2, and an aromatic or hydrophobic residue (F, W, Y, L, I, V, M, or A) as a primary anchor residue at the C-terminal position of the epitope. Exemplary members of the corresponding family of HLA molecules that bind to the B58 supermotif (i.e., the B58 supertype) include at least: B*1516, B*1517, B*5701, B*5702, and B*5801. Other allele-specific HLA molecules predicted to be members of the B58 superfamily are shown in Table VI.

[0125] Peptide binding to each of the allele-specific HLA molecules can be modulated by substitutions at primary and/or secondary anchor positions, preferably choosing respective residues specified for the supermotif.

[0126] Representative peptide epitopes that comprise the B58 supermotif are set forth on the attached Table XIII.

### IV.D.9. HLA-B62 Supermotif

[0127] The HLA-B62 supermotif is characterized by the presence in peptide ligands of the polar aliphatic residue Q or a hydrophobic aliphatic residue (L, V, M, I, or P) as a primary anchor in position 2, and a hydrophobic residue (F, W, Y, M, I, V, L, or A) as a primary anchor at the C-terminal position of the epitope. Exemplary members of the corresponding family of HLA molecules that bind to the B62 supermotif (i.e., the B62 supertype) include at least: B*1501, B*1502, B*1513, and B5201. Other allele-specific HLA molecules predicted to be members of the B62 superfamily are shown in Table VI. Peptide binding to each of the allele-specific HLA molecules can be modulated by substitutions at primary and/or secondary anchor positions, preferably choosing respective residues specified for the supermotif.

[0128] Representative peptide epitopes that comprise the B62 supermotif are set forth on the attached Table XIV.

### IV.D.10. HLA-A1 Motif

[0129] The HLA-A1 motif is characterized by the presence in peptide ligands of T, S, or M as a primary anchor residue at position 2 and the presence of Y as a primary anchor residue at the C-terminal position of the epitope. An alternative allele-specific A1 motif is characterized by a primary anchor residue at position 3 rather than position 2. This motif is characterized by the presence of D, E, A, or S as a primary anchor residue in position 3, and a Y as a primary anchor residue at the C-terminal position of the epitope. Peptide binding to HLA A1 can be modulated by substitutions at primary and/or secondary anchor positions, preferably choosing respective residues specified for the motif.

[0130] Representative peptide epitopes that comprise either A1 motif are set forth on the attached Table XV. Those epitopes comprising T, S, or M at position 2 and Y at the C-terminal position are also included in the listing of HLA-A1 supermotif-bearing peptide epitopes listed in Table VII.

### IV.D.11. HLA-A*0201 Motif

[0131] An HLA-A2*0201 motif was first determined to be characterized by the presence in peptide ligands of L or M as a primary anchor residue in position 2, and L or V as a primary anchor residue at the C-terminal position of a 9-residue peptide (Falk et al., Nature 351:290-296, 1991). The A*0201 motif was also determined to further comprise an I at position 2 and I or A at the C-terminal position of a nine amino acid peptide (Hunt et al., Science 255:1261-1263, Mar. 6, 1992; Parker et al., J. Immunol. 149:3580-3587, 1992). Subsequently, the A*0201 allele-specific motif has been defined by the present inventors to additionally comprise V, A, T, or Q as a primary anchor residue at position 2, and M as a primary anchor residue at the C-terminal position of the epitope. Additionally, the A*0201 allele-specific motif has been found to comprise a T at the C-terminal position (Kast et al., J. Immunol. 152:3904-3912, 1994). Thus, the HLA-A*0201 motif comprises peptide ligands with L, I, V, M, A, T, or Q as primary anchor residues at position 2 and L, I, V, M, A, or T as a primary anchor residue at the C-terminal position of the epitope. The preferred and tolerated residues that characterize the primary anchor positions of the HLA-A*0201 motif are identical to the residues describing the A2 supermotif. (For reviews of relevant data, see, e.g., Del Guercio et al., J. Immunol. 154:685-693, 1995; Ruppert et al., Cell 74:929-937, 1993; Sidney et al., Immunol. Today 17:261-266, 1996; Sette and Sidney, Curr. Opin. in Immunol. 10:478-482, 1998). Secondary anchor residues that characterize the A*0201 motif have additionally been defined as disclosed herein. These are disclosed in Table II. Peptide binding to HLA-A*0201 molecules can be modulated by substitutions at primary and/or secondary anchor positions, preferably choosing respective residues specified for the motif.

[0132] Representative peptide epitopes that comprise an A*0201 motif are set forth on the attached Table VIII. The A*0201 motifs comprising the primary anchor residues V, A, T, or Q at position 2 and L, I, V, A, or T at the C-terminal position are those most particularly relevant to the invention claimed herein.

### IV.D.12. HLA-A3 Motif

[0133] The HLA-A3 motif is characterized by the presence in peptide ligands of L, M, V, I, S, A, T, F, C, G, or D as a primary anchor residue at position 2, and the presence of K, Y, R, H, F, or A as a primary anchor residue at the C-terminal position of the epitope. Peptide binding to HLA-A3 can be modulated by substitutions at primary and/or secondary anchor positions, preferably choosing respective residues specified for the motif.

[0134] Representative peptide epitopes that comprise the A3 motif are set forth on the attached Table XVI. Those peptide epitopes that also comprise the A3 supermotif are also listed in Table IX.

### IV.D.13. HLA-A11 Motif

[0135] The HLA-A 11 motif is characterized by the presence in peptide ligands of V, T, M, L, I, S, A, G, N, C, D, or F as a primary anchor residue in position 2, and K, R, Y, or H as a primary anchor residue at the C-terminal position of the epitope. Peptide binding to HLA-A11 can be modulated by substitutions at primary and/or secondary anchor positions, preferably choosing respective residues specified for the motif.

[0136] Representative peptide epitopes that comprise the A11 motif are set forth on the attached Table XVII; peptide epitopes comprising the A3 allele-specific motif are also present in this Table because of the extensive overlap between the A3 and A11 motif primary anchor specificities. Further, those peptide epitopes that comprise the A3 supermotif are also listed in Table IX.

### IV.D.14. HLA-A24 Motif

[0137] The HLA-A24 motif is characterized by the presence in peptide ligands of Y, F, W, or M as a primary anchor residue in position 2, and F, L, I, or W as a primary anchor residue at the C-terminal position of the epitope. Peptide binding to HLA-A24 molecules can be modulated by substitutions at primary and/or secondary anchor positions; preferably choosing respective residues specified for the motif.

[0138] Representative peptide epitopes that comprise the A24 motif are set forth on the attached Table XVIII. These epitopes are also listed in Table X, which sets forth HLA-A24-supermotif-bearing peptide epitopes.

### Motifs Indicative of Class II HTL Inducing Peptide Epitopes

[0139] The primary and secondary anchor residues of the HLA class II peptide epitope supermotifs and motifs delineated below are summarized in Table III.

### IV.D.15. HLA DR-1-4-7 Supermotif

[0140] Motifs have also been identified for peptides that bind to three common HLA class II allele-specific HLA molecules: HLA DRB1*0401, DRB1*0101, and DRB1*0701. Collectively, the common residues from these motifs delineate the HLA DR-1-4-7 supermotif. Peptides that bind to these DR molecules carry a supermotif characterized by a large aromatic or hydrophobic residue (Y, F, W, L, I, V, or M) as a primary anchor residue in position 1, and a small, non-charged residue (S, T, C, A, P, V, I, L, or M) as a primary anchor residue in position 6 of a 9-mer core region. Allele-specific secondary effects and secondary anchors for each of these HLA types have also been identified. These are set forth in Table III. Peptide binding to HLA-DRB1*0401, DRB1*0101, and/or DRB1*0701 can be modulated by substitutions at primary and/or secondary anchor positions, preferably choosing respective residues specified for the supermotif.

[0141] Conserved peptide epitopes i.e., conserved in ≧79% (≧11/14) of the HCV strains used for the present analysis, may be described as corresponding to epitopes containing a nine residue core comprising the DR-1-4-7 supermotif, and in which the 9 residue core is conserved in ≧79% (wherein position 1 of the motif is at position 1 of the nine residue core). Conserved 9-mer core regions are set forth in Table XIXa. Respective exemplary peptide epitopes of 15 amino acid residues in length, each of which comprise a conserved nine residue core, are also shown in section “a” of the Table. Cross-reactive binding data for exemplary 15-residue supermotif-bearing peptides are shown in Table XIXb.

### IV.D.16. HLA DR3 Motifs

[0142] Two alternative motifs (i.e., submotifs) characterize peptide epitopes that bind to HLA-DR3 molecules. In the first motif (submotif DR3A) a large, hydrophobic residue (L, I, V, M, F, or Y) is present in anchor position 1 of a 9-mer core, and D is present as an anchor at position 4, towards the carboxyl terminus of the epitope. As in other class II motifs, core position 1 may or may not occupy the peptide N-terminal position.

[0143] The alternative DR3 submotif provides for lack of the large, hydrophobic residue at anchor position 1, and/or lack of the negatively charged or amide-like anchor residue at position 4, by the presence of a positive charge at position 6 towards the carboxyl terminus of the epitope. Thus, for the alternative allele-specific DR3 motif (submotif DR3B): L, I, V, M, F, Y, A, or Y is present at anchor position 1; D, N, Q, E, S, or T is present at anchor position 4; and K, R, or H is present at anchor position 6. Peptide binding to HLA-DR3 can be modulated by substitutions at primary and/or secondary anchor positions, preferably choosing respective residues specified for the motif.

[0144] Conserved 9-mer core regions (i.e., those sequences that are conserved in at least 79% of the 14 HCV strains used for the analysis) corresponding to a nine residue sequence comprising the DR3A submotif (wherein position I of the motif is at position I of the nine residue core) are set forth in Table XXa. Respective exemplary peptide epitopes of 15 amino acid residues in length, each of which comprise a conserved nine residue core, are also shown in Table XXa. Table XXb shows binding data of exemplary DR3 submotif A-bearing peptides.

[0145] Conserved 9-mer core regions (i.e., those that are at least 79% conserved in the 14 HCV strains used for the analysis) comprising the DR3B submotif and respective exemplary 15-mer peptides comprising the DR3 submotif-B epitope are set forth in Table XXc. Table XXd shows binding data of exemplary DR3 submotif B-bearing peptides.

[0146] Each of the HLA class I or class II peptide epitopes set out in the Tables herein are deemed singly to be an inventive aspect of this application. Further, it is also an inventive aspect of this application that each peptide epitope may be used in combination with any other peptide epitope.

### IV.E. Enhancing Population Coverage of the Vaccine

[0147] Vaccines that have broad population coverage are preferred because they are more commercially viable and generally applicable to the most people. Broad population coverage can be obtained using the peptides of the invention (and nucleic acid compositions that encode such peptides) through selecting peptide epitopes that bind to HLA alleles which, when considered in total, are present in most of the population. Table XXI lists the overall frequencies of the HLA class I supertypes in various ethnicities (Table XXIa) and the combined population coverage achieved by the A2-, A3-, and B7-supertypes (Table XXIb). The A2-, A3-, and B7 supertypes are each present on the average of over 40% in each of these five major ethnic groups. Coverage in excess of 80% is achieved with a combination of these supermotifs. These results suggest that effective and non-ethnically biased population coverage is achieved upon use of a limited number of cross-reactive peptides. Although the population coverage reached with these three main peptide specificities is high, coverage can be expanded to reach 95% population coverage and above, and more easily achieve truly multispecific responses upon use of additional supermotif or allele-specific motif bearing peptides.

[0148] The B44-, A1-, and A24-supertypes are present, on average, in a range from 25% to 40% in these major ethnic populations (Table XXIa). While less prevalent overall, the B27-, B58-, and B62 supertypes are each present with a frequency >25% in at least one major ethnic group (Table XXIa). Table XXIb summarizes the estimated prevalence of combinations of HLA supertypes that have been identified in five major ethnic groups. The incremental coverage obtained by the inclusion of A1, -A24-, and B44-supertypes to the A2, A3, and B7 coverage, or all of the supertypes described herein, is shown.

[0149] The data presented herein, together with the previous definition of the A2-, A3-, and B7-supertypes, indicates that all antigens, with the possible exception of A29, B8, and B46, can be classified into a total of nine HLA supertypes. By including epitopes from the six most frequent supertypes, an average population coverage of 99% is obtained for five major ethnic groups.

### IV.F. Immune Response-Stimulating Peptide Analogs

[0150] In general, CTL and HTL responses are not directed against all possible epitopes. Rather, they are restricted to a few “immunodominant” determinants (Zinkemagel, et al., Adv. Immunol. 27:5159, 1979; Bennink, et al., J. Exp. Med. 168:19351939, 1988; Rawle, et al., J. Immunol. 146:3977-3984, 1991). It has been recognized that immunodominance (Benacerraf, et al., Science 175:273-279, 1972) could be explained by either the ability of a given epitope to selectively bind a particular HLA protein (determinant selection theory) (Vitiello, et al., J. Immunol. 131:1635, 1983); Rosenthal, et al., Nature 267:156-158, 1977), or to be selectively recognized by the existing TCR (T cell receptor) specificities (repertoire theory) (Klein, J., IMMUNOLOGY, THE SCIENCE OF SELFNONSELF DISCRIMINATION, John Wiley & Sons, New York, pp. 270-310, 1982). It has been demonstrated that additional factors, mostly linked to processing events, can also play a key role in dictating, beyond strict immunogenicity, which of the many potential determinants will be presented as immunodominant (Sercarz, et al., Annu. Rev. Immunol. 11:729-766, 1993).

[0151] The concept of dominance and subdominance is relevant to immunotherapy of both infectious diseases and cancer. For example, in the course of chronic viral disease, recruitment of subdominant epitopes can be important for successful clearance of the infection, especially if dominant CTL or HTL specificities have been inactivated by functional tolerance, suppression, mutation of viruses and other mechanisms (Franco, et al., Curr. Opin. Immunol. 7:524-531, 1995). In the case of cancer and tumor antigens, CTLs recognizing at least some of the highest binding affinity peptides might be functionally inactivated. Lower binding affinity peptides are preferentially recognized at these times, and may therefore be preferred in therapeutic or prophylactic anti-cancer vaccines.

[0152] In particular, it has been noted that a significant number of epitopes derived from known non-viral tumor associated antigens (TAA) bind HLA class I with intermediate affinity (IC₅₀ in the 50-500 nM range). For example, it has been found that 8 of 15 known TAA peptides recognized by tumor infiltrating lymphocytes (TIL) or CTL bound in the 50-500 nM range. (These data are in contrast with estimates that 90% of known viral antigens were bound by HLA class I molecules with IC₅₀ of 50 nM or less, while only approximately 10% bound in the 50-500 mM range (Sette, et al., J. Immunol., 153:558-5592, 1994). In the cancer setting this phenomenon is probably due to elimination or functional inhibition of the CTL recognizing several of the highest binding peptides, presumably because of T cell tolerization events.

[0153] Without intending to be bound by theory, it is believed that because T cells to dominant epitopes may have been clonally deleted, selecting subdominant epitopes may allow existing T cells to be recruited, which will then lead to a therapeutic or prophylactic response. However, the binding of HLA molecules to subdominant epitopes is often less vigorous than to dominant ones. Accordingly, there is a need to be able to modulate the binding affinity of particular immunogenic epitopes for one or more HLA molecules, and thereby to modulate the immune response elicited by the peptide, for example to prepare analog peptides which elicit a more vigorous response. This ability would greatly enhance the usefulness of peptide-based vaccines and therapeutic agents.

[0154] Although peptides with suitable cross-reactivity among all alleles of a superfamily are identified by the screening procedures described above, cross-reactivity is not always as complete as possible, and in certain cases procedures to increase cross-reactivity of peptides can be useful; moreover, such procedures can also be used to modify other properties of the peptides such as binding affinity or peptide stability. Having established the general rules that govern cross-reactivity of peptides for HLA alleles within a given motif or supermotif, modification (i.e., analoging) of the structure of peptides of particular interest in order to achieve broader (or otherwise modified) HLA binding capacity can be performed. More specifically, peptides which exhibit the broadest cross-reactivity patterns, can be produced in accordance with the teachings herein. The present concepts related to analog generation are set forth in greater detail in co-pending U.S. Ser. No. 09/226,775 filed Jan. 6, 1999.

[0155] In brief, the strategy employed utilizes the motifs or supermotifs which correlate with binding to certain HLA molecules. The motifs or supermotifs are defined by having primary anchors, and in many cases secondary anchors. Analog peptides can be created by substituting amino acid residues at primary anchor, secondary anchor, or at primary and secondary anchor positions. Generally, analogs are made for peptides that already bear a motif or supermotif. Preferred secondary anchor residues of supermotifs and motifs that have been defined for HLA class I and class II binding peptides are shown in Tables II and III, respectively.

[0156] For a number of the motifs or supermotifs in accordance with the invention, residues are defined which are deleterious to binding to allele-specific HLA molecules or members of HLA supertypes that bind the respective motif or supermotif (Tables II and III). Accordingly, removal of such residues that are detrimental to binding can be performed in accordance with the present invention. For example, in the case of the A3 supertype, when all peptides that have such deleterious residues are removed from the population of analyzed peptides, the incidence of cross-reactivity increases from 22% to 37% (see, e.g., Sidney, J. et al., Hu. Immunol. 45:79, 1996). Thus, one strategy to improve the cross-reactivity of peptides within a given supermotif is simply to delete one or more of the deleterious residues present within a peptide and substitute a small “neutral” residue such as Ala (that may not influence T cell recognition of the peptide). An enhanced likelihood of cross-reactivity is expected if, together with elimination of detrimental residues within a peptide, “preferred” residues associated with high affinity binding to an allele-specific HLA molecule or to multiple HLA molecules within a superfamily are inserted.

[0157] To ensure that an analog peptide, when used as a vaccine, actually elicits a CTL response to the native epitope in vivo (or, in the case of class II epitopes, elicits helper T cells that cross-react with the wild type peptides), the analog peptide may be used to immunize T cells in vitro from individuals of the appropriate HLA allele. Thereafter, the immunized cells' capacity to induce lysis of wild type peptide sensitized target cells is evaluated. It will be desirable to use as antigen presenting cells, cells that have been either infected, or transfected with the appropriate genes, or, in the case of class II epitopes only, cells that have been pulsed with whole protein antigens, to establish whether endogenously produced antigen is also recognized by the relevant T cells.

[0158] Another embodiment of the invention is to create analogs of weak binding peptides, to thereby ensure adequate numbers of cross-reactive cellular binders. Class I binding peptides exhibiting binding affinities of 500-5000 nM, and carrying an acceptable but suboptimal primary anchor residue at one or both positions can be “fixed” by substituting preferred anchor residues in accordance with the respective supertype. The analog peptides can then be tested for crossbinding activity.

[0159] Another embodiment for generating effective peptide analogs involves the substitution of residues that have an adverse impact on peptide stability or solubility in, e.g., a liquid environment. This substitution may occur at any position of the peptide epitope. For example, a cysteine (C) can be substituted out in favor of α-amino butyric acid. Due to its chemical nature, cysteine has the propensity to form disulfide bridges and sufficiently alter the peptide structurally so as to reduce binding capacity. Substituting α-amino butyric acid for C not only alleviates this problem, but actually improves binding and crossbinding capability in certain instances (see, e.g., the review by Sette et al., In: Persistent Viral Infections, Eds. R. Ahmed and I. Chen, John Wiley & Sons, England, 1999). Substitution of cysteine with α-amino butyric acid may occur at any residue of a peptide epitope, i.e. at either anchor or non-anchor positions.

[0160] Representative analog peptides are set forth in Table XXII. The Table indicates the length and sequence of the analog peptide as well as the motif or supermotif, if appropriate. The information in the “Fixed Nomenclature” column indicates the residues substituted at the indicated position numbers for the respective analog.

### IV.G. Computer Screening of Protein Sequences from Disease-Related Antigens for Supermotif- or Motif-Bearing Peptides

[0161] In order to identify supermotif- or motif-bearing epitopes in a target antigen, a native protein sequence, e.g., a tumor-associated antigen, or sequences from an infectious organism, or a donor tissue for transplantation, is screened using a means for computing, such as an intellectual calculation or a computer, to determine the presence of a supermotif or motif within the sequence. The information obtained from the analysis of native peptide can be used directly to evaluate the status of the native peptide or may be utilized subsequently to generate the peptide epitope.

[0162] Computer programs that allow the rapid screening of protein sequences for the occurrence of the subject supermotifs or motifs are encompassed by the present invention; as are programs that permit the generation of analog peptides. These programs are implemented to analyze any identified amino acid sequence or operate on an unknown sequence and simultaneously determine the sequence and identify motif-bearing epitopes thereof; analogs can be simultaneously determined as well. Generally, the identified sequences will be from a pathogenic organism or a tumor-associated peptide. For example, the target molecules considered herein include, without limitation, the core, S, E1, NS11/E2, NS2, NS3, NS4, and NS5 regions of HCV.

[0163] In cases where the sequence of multiple variants of the same target protein are available, peptides may also be selected on the basis of their conservancy. A presently preferred criterion for conservancy defines that the entire sequence of an HLA class I binding peptide or the entire 9-mer core of a class II binding peptide, be totally (i.e., 100%) conserved in at least 79% of the sequences evaluated for a specific protein. This definition of conservancy has been employed herein; although, as appreciated by those in the art, lower or higher degrees of conservancy can be employed as appropriate for a given antigenic target.

[0164] It is important that the selection criteria utilized for prediction of peptide binding are as accurate as possible, to correlate most efficiently with actual binding. Prediction of peptides that bind, for example, to HLA-A*0201, on the basis of the presence of the appropriate primary anchors, is positive at about a 30% rate (see, e.g., Ruppert, J. et al. Cell 74:929, 1993). However, by extensively analyzing peptide-HLA binding data disclosed herein, data in related patent applications, and data in the art, the present inventors have developed a number of allele-specific polynomial algorithms that dramatically increase the predictive value over identification on the basis of the presence of primary anchor residues alone. These algorithms take into account not only the presence or absence of primary anchors, but also consider the positive or deleterious presence of secondary anchor residues (to account for the impact of different amino acids at different positions). The algorithms are essentially based on the premise that the overall affinity (or ΔG) of peptide-HLA interactions can be approximated as a linear polynomial function of the type:

ΔG=a₁ᵢ×a₂ᵢ×a₃ᵢ . . . ×aₙᵢ

where aⱼᵢ is a coefficient that represents the effect of the presence of a given amino acid (j) at a given position (i) along the sequence of a peptide of n amino acids. An important assumption of this method is that the effects at each position are essentially independent of each other. This assumption is justified by studies that demonstrated that peptides are bound to HLA molecules and recognized by T cells in essentially an extended conformation. Derivation of specific algorithm coefficients has been described, for example, in Gulukota, K. et al., J. Mol. Biol. 267:1258, 1997.

[0165] Additional methods to identify preferred peptide sequences, which also make use of specific motifs, include the use of neural networks and molecular modeling programs (see, e.g., Milik et al., Nature Biotechnology 16:753, 1998; Altuvia et al., Hum. Immunol. 58:1, 1997; Altuvia et al, J. Mol. Biol. 249:244, 1995; Buus, S. Curr. Opin. Immunol. 11:209-213, 1999; Brusic, V. et al., Bioinformatics 14:121-130, 1998; Parker et al., J. Immunol. 152:163, 1993; Meister et al., Vaccine 13:581, 1995; Hammer et al., J. Exp. Med. 180:2353, 1994; Sturniolo et al., Nature Biotechnol. 17:555 1999).

[0166] For example, it has been shown that in sets of A*0201 motif-bearing peptides containing at least one preferred secondary anchor residue while avoiding the presence of any deleterious secondary anchor residues, 69% of the peptides will bind A*0201 with an IC₅₀ less than 500 nM (Ruppert, J. et al. Cell 74:929, 1993). These algorithms are also flexible in that cut-off scores may be adjusted to select sets of peptides with greater or lower predicted binding properties, as desired.

[0167] In utilizing computer screening to identify peptide epitopes, a protein sequence or translated sequence may be analyzed using software developed to search for motifs, for example the “FINDPATTERNS’ program (Devereux, et al. Nucl. Acids Res. 12:387-395, 1984) or MotifSearch 1.4 software program (D. Brown, San Diego, Calif.) to identify potential peptide sequences containing appropriate HLA binding motifs. The identified peptides can be scored using customized polynomial algorithms to predict their capacity to bind specific HLA class I or class II alleles. As appreciated by one of ordinary skill in the art, a large array of computer programming software and hardware options are available in the relevant art which can be employed to implement the motifs of the invention in order to evaluate (e.g., without limitation, to identify epitopes, identify epitope concentration per peptide length, or to generate analogs) known or unknown peptide sequences.

[0168] In accordance with the procedures described above, HCV peptide epitopes and analogs thereof that are able to bind HLA supertype groups or allele-specific HLA molecules have been identified (Tables VII XX; Table XXII).

### IV.H. Preparation of Peptide Epitopes

[0169] Peptides in accordance with the invention can be prepared synthetically, by recombinant DNA technology or chemical synthesis, or from natural sources such as native tumors or pathogenic organisms. Peptide epitopes may be synthesized individually or as polyepitopic peptides. Although the peptide will preferably be substantially free of other naturally occurring host cell proteins and fragments thereof, in some embodiments the peptides may be synthetically conjugated to native fragments or particles.

[0170] The peptides in accordance with the invention can be a variety of lengths, and either in their neutral (uncharged) forms or in forms which are salts. The peptides in accordance with the invention are either free of modifications such as glycosylation, side chain oxidation, or phosphorylation; or they contain these modifications, subject to the condition that modifications do not destroy the biological activity of the peptides as described herein.

[0171] Desirably, the peptide epitope will be as small as possible while still maintaining substantially all of the immunologic activity of the native protein. When possible, it may be desirable to optimize HLA class I binding peptide epitopes of the invention to a length of about 8 to about 13 amino acid residues, preferably 9 to 10. HLA class II binding peptide epitopes may be optimized to a length of about 6 to about 30 amino acids in length, preferably to between about 13 and about 20 residues. Preferably, the peptide epitopes are commensurate in size with endogenously processed pathogen-derived peptides or tumor cell peptides that are bound to the relevant HLA molecules.

[0172] The identification and preparation of peptides of other lengths can also be carried out using the techniques described herein. Moreover, it is preferred to identify native peptide regions that contain a high concentration of class I and/or class II epitopes. Such a sequence is generally selected on the basis that it contains the greatest number of epitopes per amino acid length. It is to be appreciated that epitopes can be present in a frame-shifted manner, e.g. a 10 amino acid long peptide could contain two 9 amino acid long epitopes and one 10 amino acid long epitope; upon intracellular processing, each epitope can be exposed and bound by an HLA molecule upon administration of such a peptide. This larger, preferably multi-epitopic, peptide can be generated synthetically, recombinantly, or via cleavage from the native source.

[0173] The peptides of the invention can be prepared in a wide variety of ways. For the preferred relatively short size, the peptides can be synthesized in solution or on a solid support in accordance with conventional techniques. Various automatic synthesizers are commercially available and can be used in accordance with known protocols. (See, for example, Stewart & Young, SOLID PHASE PEPTIDE SYNTHESIS, 2D. ED., Pierce Chemical Co., 1984). Further, individual peptide epitopes can be joined using chemical ligation to produce larger peptides that are still within the bounds of the invention.

[0174] Alternatively, recombinant DNA technology can be employed wherein a nucleotide sequence which encodes an immunogenic peptide of interest is inserted into an expression vector, transformed or transfected into an appropriate host cell and cultivated under conditions suitable for expression. These procedures are generally known in the art, as described generally in Sambrook et al., MOLECULAR CLONING, A LABORATORY MANUAL, Cold Spring Harbor Press, Cold Spring Harbor, N.Y. (1989). Thus, recombinant polypeptides which comprise one or more peptide sequences of the invention can be used to present the appropriate T cell epitope.

[0175] The nucleotide coding sequence for peptide epitopes of the preferred lengths contemplated herein can be synthesized by chemical techniques, for example, the phosphotriester method of Matteucci, et al., J. Am. Chem. Soc. 103:3185 (1981). Peptide analogs can be made simply by substituting the appropriate and desired nucleic acid base(s) for those that encode the native peptide sequence; exemplary nucleic acid substitutions are those that encode an amino acid defined by the motifs/supermotifs herein. The coding sequence can then be provided with appropriate linkers and ligated into expression vectors commonly available in the art, and the vectors used to transform suitable hosts to produce the desired fusion protein. A number of such vectors and suitable host systems are now available. For expression of the fusion proteins, the coding sequence will be provided with operably linked start and stop codons, promoter and terminator regions and usually a replication system to provide an expression vector for expression in the desired cellular host. For example, promoter sequences compatible with bacterial hosts are provided in plasmids containing convenient restriction sites for insertion of the desired coding sequence. The resulting expression vectors are transformed into suitable bacterial hosts. Of course, yeast, insect or mammalian cell hosts may also be used, employing suitable vectors and control sequences.

### IV.I. Assays to Detect T-Cell Responses

[0176] Once HLA binding peptides are identified, they can be tested for the ability to elicit a T-cell response. The preparation and evaluation of motif-bearing peptides are described in PCT publications WO 94/20127 and WO 94/03205. Briefly, peptides comprising epitopes from a particular antigen are synthesized and tested for their ability to bind to the appropriate HLA proteins. These assays may involve evaluating the binding of a peptide of the invention to purified HLA class I molecules in relation to the binding of a radioiodinated reference peptide. Alternatively, cells expressing empty class I molecules (i.e. lacking peptide therein) may be evaluated for peptide binding by immunofluorescent staining and flow microfluorimetry. Other assays that may be used to evaluate peptide binding include peptide-dependent class I assembly assays and/or the inhibition of CTL recognition by peptide competition. Those peptides that bind to the class I molecule, typically with an affinity of 500 nM or less, are further evaluated for their ability to serve as targets for CTLs derived from infected or immunized individuals, as well as for their capacity to induce primary in vitro or in vivo CTL responses that can give rise to CTL populations capable of reacting with selected target cells associated with a disease. Corresponding assays are used for evaluation of HLA class II binding peptides. HLA class II motif-bearing peptides that are shown to bind, typically at an affinity of 1000 nM or less, are further evaluated for the ability to stimulate HTL responses.

[0177] Conventional assays utilized to detect T cell responses include proliferation assays, lymphokine secretion assays, direct cytotoxicity assays, and limiting dilution assays. For example, antigen-presenting cells that have been incubated with a peptide can be assayed for the ability to induce CTL responses in responder cell populations. Antigen-presenting cells can be normal cells such as peripheral blood mononuclear cells or dendritic cells. Alternatively, mutant non-human mammalian cell lines that are deficient in their ability to load class I molecules with internally processed peptides and that have been transfected with the appropriate human class I gene, may be used to test for the capacity of the peptide to induce in vitro primary CTL responses.

[0178] Peripheral blood mononuclear cells (PBMCs) may be used as the responder cell source of CTL precursors. The appropriate antigen-presenting cells are incubated with peptide, after which the peptide-loaded antigen-presenting cells are then incubated with the responder cell population under optimized culture conditions. Positive CTL activation can be determined by assaying the culture for the presence of CTLs that kill radio-labeled target cells, both specific peptide-pulsed targets as well as target cells expressing endogenously processed forms of the antigen from which the peptide sequence was derived.

[0179] More recently, a method has been devised which allows direct quantification of antigen-specific T cells by staining with Fluorescein-labelled HLA tetrameric complexes (Altman, J. D. et al., Proc. Natl. Acad. Sci. USA 90:10330, 1993; Altman, J. D. et al., Science 274:94, 1996). Other relatively recent technical developments include staining for intracellular lymphokines, and interferon release assays or ELISPOT assays. Tetramer staining, intracellular lymphokine staining and ELISPOT assays all appear to be at least 10-fold more sensitive than more conventional assays (Lalvani, A. et al., J. Exp. Med. 186:859, 1997; Dunbar, P. R. et al., Curr. Biol. 8:413, 1998; Murali-Krishna, K. et al., Immunity 8:177, 1998).

[0180] HTL activation may also be assessed using such techniques known to those in the art such as T cell proliferation and secretion of lymphokines, e.g. IL-2 (see, e.g. Alexander et al, Immunity 1:751-761, 1994).

[0181] Alternatively, immunization of HLA transgenic mice can be used to determine immunogenicity of peptide epitopes. Several transgenic mouse models including mice with human A2.1, A11 (which can additionally be used to analyze HLA-A3 epitopes), and B7 alleles have been characterized and others (e.g., transgenic mice for HLA-A1 and A24) are being developed. HLA-DR1 and HLA-DR3 mouse models have also been developed. Additional transgenic mouse models with other HLA alleles may be generated as necessary. Mice may be immunized with peptides emulsified in Incomplete Freund's Adjuvant and the resulting T cells tested for their capacity to recognize peptide-pulsed target cells and target cells transfected with appropriate genes. CTL responses may be analyzed using cytotoxicity assays described above. Similarly, HTL responses may be analyzed using such assays as T cell proliferation or secretion of lymphokines.

[0182] Exemplary immunogenic peptide epitopes are set out in Table XXIII.

### IV.J. Use of Peptide Epitopes as Diagnostic Agents and for Evaluating Immune Responses

[0183] HLA class I and class II binding peptides as described herein can be used, in one embodiment of the invention, as reagents to evaluate an immune response. The immune response to be evaluated may be induced by using as an immunogen any agent that may result in the production of antigen-specific CTLs or HTLs that recognize and bind to the peptide epitope(s) to be employed as the reagent. The peptide reagent need not be used as the immunogen. Assay systems that may be used for such an analysis include relatively recent technical developments such as tetramers, staining for intracellular lymphokines and interferon release assays, or ELISPOT assays.

[0184] For example, a peptide of the invention may be used in a tetramer staining assay to assess peripheral blood mononuclear cells for the presence of antigen-specific CTLs following exposure to a pathogen or immunogen. The HLA-tetrameric complex is used to directly visualize antigen-specific CTLs (see, e.g., Ogg et al., Science 279:2103-2106, 1998; and Altman et al., Science 174:94-96, 1996) and determine the frequency of the antigen-specific CTL population in a sample of peripheral blood mononuclear cells. A tetramer reagent using a peptide of the invention may be generated as follows: A peptide that binds to an HLA molecule is refolded in the presence of the corresponding HLA heavy chain and β₂-microglobulin to generate a trimolecular complex. The complex is biotinylated at the carboxyl terminal end of the heavy chain at a site that was previously engineered into the protein. Tetramer formation is then induced by the addition of streptavidin. By means of fluorescently labeled streptavidin, the tetramer can be used to stain antigen-specific cells. The cells may then be identified, for example, by flow cytometry. Such an analysis may be used for diagnostic or prognostic purposes.

[0185] Peptides of the invention may also be used as reagents to evaluate immune recall responses. (see, e.g., Bertoni et al., J. Clin. Invest. 100:503-513, 1997 and Penna et al., J. Exp. Med. 174:1565-1570, 1991.) For example, patient PBMC samples from individuals with HCV infection may be analyzed for the presence of antigen-specific CTLs or HTLs using specific peptides. A blood sample containing mononuclear cells may be evaluated by cultivating the PBMCs and stimulating the cells with a peptide of the invention. After an appropriate cultivation period, the expanded cell population may be analyzed, for example, for cytotoxic activity (CTL) or for HTL activity.

[0186] The peptides may also be used as reagents to evaluate the efficacy of a vaccine. PBMCs obtained from a patient vaccinated with an immunogen may be analyzed using, for example, either of the methods described above. The patient is HLA typed, and peptide epitope reagents that recognize the allele-specific molecules present in that patient are selected for the analysis. The immunogenicity of the vaccine is indicated by the presence of HCV epitope-specific CTLs and/or HTLs in the PBMC sample.

[0187] The peptides of the invention may also be used to make antibodies, using techniques well known in the art (see, e.g. CURRENT PROTOCOLS IN IMMUNOLOGY, Wiley/Greene, NY; and Antibodies A Laboratory Manual Harlow, Harlow and Lane, Cold Spring Harbor Laboratory Press, 1989), which may be useful as reagents to diagnose HCV infection. Such antibodies include those that recognize a peptide in the context of an HLA molecule, i.e., antibodies that bind to a peptide-MHC complex.

### IV.K. Vaccine Compositions

[0188] Vaccines that contain an immunogenically effective amount of one or more peptides as described herein are a further embodiment of the invention. Once appropriately immunogenic epitopes have been defined, they can be sorted and delivered by various means, herein referred to as “vaccine” compositions. Such vaccine compositions can include, for example, lipopeptides (e.g., Vitiello, A. et al., J. Clin. Invest. 95:341, 1995), peptide compositions encapsulated in poly(DL-lactide-co-glycolide) (“PLG”) microspheres (see, e.g., Eldridge, et al., Molec. Immunol. 28:287-294, 1991: Alonso et al., Vaccine 12:299-306, 1994; Jones et al., Vaccine 13:675-681, 1995), peptide compositions contained in immune stimulating complexes (ISCOMS) (see, e.g., Takahashi et al., Nature 344:873-875, 1990; Hu et al., Clin Exp Immunol. 113:235-243, 1998), multiple antigen peptide systems (MAPs) (see e.g., Tam, J. P., Proc. Natl. Acad. Sci. U.S.A. 85:5409-5413, 1988; Tam, J. P., J. Immunol. Methods 196:17-32, 1996), viral delivery vectors (Perkus, M. E. et al., In: Concepts in vaccine development, Kaufmann, S. H. E., ed., p. 379, 1996; Chakrabarti, S. et al., Nature 320:535, 1986; Hu, S. L. et al., Nature 320:537, 1986; Kieny, M.-P. et al., AIDS Bio/Technology 4:790, 1986; Top, F. H. et al., J. Infect. Dis. 124:148, 1971; Chanda, P. K. et al., Virology 175:535, 1990), particles of viral or synthetic origin (e.g., Kofler, N. et al., J. Immunol. Methods. 192:25, 1996; Eldridge, J. H. et al., Sem. Hematol. 30:16, 1993; Falo, L. D., Jr. et al., Nature Med. 7:649, 1995), adjuvants (Warren, H. S., Vogel, F. R., and Chedid, L. A. Annu. Rev. Immunol. 4:369, 1986; Gupta, R. K. et al., Vaccine 11:293, 1993), liposomes (Reddy, R. et al., J. Immunol. 148:1585, 1992; Rock, K. L., Immunol. Today 17:131, 1996), or, naked or particle absorbed cDNA (Ulmer, J. B. et al., Science 259:1745, 1993; Robinson, H. L., Hunt, L. A., and Webster, R. G., Vaccine 11:957, 1993; Shiver, J. W. et al., In: Concepts in vaccine development, Kaufmann, S. H. E., ed., p. 423, 1996; Cease, K. B., and Berzofsky, J. A., Annu. Rev. Immunol. 12:923, 1994 and Eldridge, J. H. et al., Sem. Hematol. 30:16, 1993). Toxin-targeted delivery technologies, also known as receptor mediated targeting, such as those of Avant Immunotherapeutics, Inc. (Needham, Mass.) may also be used.

[0189] Furthermore, vaccines in accordance with the invention encompass compositions of one or more of the claimed peptide(s). The peptide(s) can be individually linked to its own carrier; alternatively, the peptide(s) can exist as a homopolymer or heteropolymer of active peptide units. Such a polymer has the advantage of increased immunological reaction and, where different peptide epitopes are used to make up the polymer, the additional ability to induce antibodies and/or CTLs that react with different antigenic determinants of the pathogenic organism or tumor-related peptide targeted for an immune response. The composition may be a naturally occurring region of an antigen or may be prepared, e.g., recombinantly or by chemical synthesis.

[0190] Furthermore, useful carriers that can be used with vaccines of the invention are well known in the art, and include, e.g., thyroglobulin, albumins such as human serum albumin, tetanus toxoid, polyamino acids such as poly L-lysine, poly L-glutamic acid, influenza, hepatitis B virus core protein, and the like. The vaccines can contain a physiologically tolerable (i.e., acceptable) diluent such as water, or saline, preferably phosphate buffered saline. The vaccines also typically include an adjuvant. Adjuvants such as incomplete Freund's adjuvant, aluminum phosphate, aluminum hydroxide, or alum are examples of materials well known in the art. Additionally, as disclosed herein, CTL responses can be primed by conjugating peptides of the invention to lipids, such as tripalmitoyl-S-glycerylcysteinlyseryl-serine (P₃CSS).

[0191] As disclosed in greater detail herein, upon immunization with a peptide composition in accordance with the invention, via injection, aerosol, oral, transdermal, transmucosal, intrapleural, intrathecal, or other suitable routes, the immune system of the host responds to the vaccine by producing large amounts of CTLs specific for the desired antigen. Consequently, the host becomes at least partially immune to later infection, or at least partially resistant to developing an ongoing chronic infection, or derives at least some therapeutic benefit when the antigen was tumor-associated.

[0192] In some instances it may be desirable to combine the class I peptide vaccines of the invention with vaccines which induce or facilitate neutralizing antibody responses to the target antigen of interest, particularly to viral envelope antigens. A preferred embodiment of such a composition comprises class I and class II epitopes in accordance with the invention. An alternative embodiment of such a composition comprises a class I and/or class II epitope in accordance with the invention, along with a PADRE™ (Epimmune, San Diego, Calif.) molecule (described, for example, in U.S. Pat. No. 5,736,142). Furthermore, any of these embodiments can be administered as a nucleic acid mediated modality.

[0193] The vaccine compositions of the invention may also be used in combination with antiviral drugs such as interferon-α.

[0194] For therapeutic or prophylactic immunization purposes, the peptides of the invention can also be expressed by viral or bacterial vectors. Examples of expression vectors include attenuated viral hosts, such as vaccinia or fowlpox. This approach involves the use of vaccinia virus, for example, as a vector to express nucleotide sequences that encode the peptides of the invention. Upon introduction into an acutely or chronically infected host or into a non-infected host, the recombinant vaccinia virus expresses the immunogenic peptide, and thereby elicits a host CTL and/or HTL response. Vaccinia vectors and methods useful in immunization protocols are described in, e.g., U.S. Pat. No. 4,722,848. Another vector is BCG (Bacille Calmette Guerin). BCG vectors are described in Stover et al., Nature 351:456-460 (1991). A wide variety of other vectors useful for therapeutic administration or immunization of the peptides of the invention, e.g. adeno and adeno-associated virus vectors, retroviral vectors, Salmonella typhi vectors, detoxified anthrax toxin vectors, and the like, will be apparent to those skilled in the art from the description herein.

[0195] Antigenic peptides are used to elicit a CTL and/or HTL response ex vivo, as well. The resulting. CTL or HTL cells, can be used to treat chronic infections, or tumors in patients that do not respond to other conventional forms of therapy, or will not respond to a therapeutic vaccine peptide or nucleic acid in accordance with the invention. Ex vivo CTL or HTL responses to a particular antigen (infectious or tumor-associated antigen) are induced by incubating in tissue culture the patient's, or genetically compatible, CTL or HTL precursor cells together with a source of antigen-presenting cells (APC), such as dendritic cells, and the appropriate immunogenic peptide. After an appropriate incubation time (typically about 14 weeks), in which the precursor cells are activated and expanded into effector cells, the cells are infused back into the patient, where they will destroy (CTL) or facilitate destruction (HTL) of their specific target cell (an infected cell or a tumor cell). Transfected dendritic cells may also be used as antigen presenting cells. Alternatively, dendritic cells are transfected, e.g., with a minigene construct in accordance with the invention, in order to elicit immune responses. Minigenes will be discussed in greater detail in a following section.

[0196] Vaccine compositions may also be administered in vivo in combination with dendritic cell mobilization whereby loading of dendritic cells occurs in vivo.

[0197] DNA or RNA encoding one or more of the peptides of the invention can also be administered to a patient. This approach is described, for instance, in Wolff et. al., Science 247:1465 (1990) as well as U.S. Pat. Nos. 5,580,859; 5,589,466; 5,804,566; 5,739,118; 5,736,524; 5,679,647; WO 98/04720; and in more detail below. Examples of DNA-based delivery technologies include “naked DNA”, facilitated (bupivicaine, polymers, peptide-mediated) delivery, cationic lipid complexes, and particle-mediated (“gene gun”) delivery.

[0198] Preferably, the following principles are utilized when selecting an array of epitopes for inclusion in a polyepitopic composition for use in a vaccine, or for selecting discrete epitopes to be included in a vaccine and/or to be encoded by nucleic acids such as a minigene. Exemplary epitopes that may be utilized in a vaccine to treat or prevent HCV infection are set out in Tables XXVI-XXIX, and Table XXXII. It is preferred that each of the following principles are balanced in order to make the selection.

[0199] 1.) Epitopes are selected which, upon administration, mimic immune responses that have been observed to be correlated with HCV clearance. For HLA Class I this includes 3-4 epitopes that come from at least one antigen of HCV. For HLA Class II a similar rationale is employed; again 3-4 epitopes are selected from at least one HCV antigen (see e.g., Rosenberg et al., Science 278:1447-1450).

[0200] 2.) Epitopes are selected that have the requisite binding affinity established to be correlated with immunogenicity: for HLA Class I an IC₅₀ of 500 nM or less, or for Class II an IC₅₀ of 1000 nM or less.

[0201] 3.) Sufficient supermotif bearing-peptides, or a sufficient array of allele-specific motif-bearing peptides, are selected to give broad population coverage. For example, it is preferable to have at least 80% population coverage. A Monte Carlo analysis, a statistical evaluation known in the art, can be employed to assess the breadth, or redundancy of, population coverage.

[0202] 4.) When selecting epitopes from cancer-related antigens it is often preferred to select analogs because the patient may have developed tolerance to the native epitope. When selecting epitopes for infectious disease-related antigens it is preferable to select either native or analoged epitopes. Of particular relevance for infectious disease vaccines (but for cancer-related vaccines as well), are epitopes referred to as “nested epitopes.” Nested epitopes occur where at least two epitopes overlap in a given peptide sequence. A peptide comprising “transcendent nested epitopes” is a peptide that has both HLA class I and HLA class II epitopes in it.

[0203] When providing nested epitopes, it is preferable to provide a sequence that has the greatest number of epitopes per provided sequence. Preferably, one avoids providing a peptide that is any longer than the amino terminus of the amino terminal epitope and the carboxyl terminus of the carboxyl terminal epitope in the peptide. When providing a longer peptide sequence, such as a sequence comprising nested epitopes, it is important to screen the sequence in order to insure that it does not have pathological or other deleterious biological properties.

[0204] 5.) When creating a minigene, as disclosed in greater detail in the following section, an objective is to generate the smallest peptide possible that encompasses the epitopes of interest. The principles employed are similar, if not the same as those employed when selecting a peptide comprising nested epitopes. Furthermore, upon determination of the nucleic acid sequence to be provided as a minigene, the peptide encoded thereby is analyzed to determine whether any “junctional epitopes” have been created. A junctional epitope is an actual binding epitope, as predicted, e.g., by motif analysis, that only exists because two discrete peptide sequences are encoded directly next to each other. Junctional epitopes are generally to be avoided because the recipient may generate an immune response to that non-native epitope. Of particular concern is a junctional epitope that is a “dominant epitope.” A dominant epitope may lead to such a zealous response that immune responses to other epitopes are diminished or suppressed.

[0205] Polyepitopic vaccine compositions may include epitopes from the core, S, E1, NS1/E2, NS2, NS3, NS4, and NS5 domains of the HCV polyprotein. These regions encompass the following amino acid sequences using numbering relative to the prototype HCV-1 strain (Genbank accession number M62321; see, e.g., U.S. Pat. Nos. 5,683,864 and 5,670,153): C domain (amino acids 1-120); S (amino acids 120-400); NS3 (amino acids 1050-1640); NS4 (amino acids 1640-2000); NS5 (amino acids 2000-3011); and envelop proteins, E1 and E2/NS1, encompassing amino acids 192-750. Amino acids 750 to 1050 are designated as domain X as applied to the present invention. As appreciated by one of ordinary skill in the art, the designation of the amino acid range for each domain may diverge to some extent from that of HCV-1 depending on the strain of HCV. One of ordinary skill in the art, when looking at an HCV polyprotein sequence, would readily be able to determine the domain boundaries.

[0206] Specific embodiments of the polyepitopic compositions of the present invention include a pharmaceutical composition comprising a pharmaceutically acceptable carrier and combination of motif-bearing peptides that are immunologically cross-reactive with peptides of HCV-1, wherein at least one of the peptides bears a motif of Table Ia, and further wherein the combination of motif-bearing peptides consists of: a) one or more peptides comprising at least 8 amino acids from an HCV C domain; b) one or more peptides comprising at least 8 amino acids of a further domain selected from the group consisting of: an S domain, an NS3 domain, an NS4 domain, or an NS5 domain, and; c) optionally, one or more motif-bearing peptides from one or more additional HCV domains with a proviso that an additional domain is not a further domain listed in “b”. Preferably, such a pharmaceutical composition may additionally comprise one or more distinct HCV motif-bearing peptide(s) comprising at least 8 amino acids of an X domain or, alternatively, the composition may further comprise additional HCV motif-bearing peptide(s) that are from an envelope domain, the envelope domain peptide(s) consisting of one or more copies of a single HCV peptide comprising at least 8 amino acids of an envelope domain.

[0207] In another embodiment, the polyepitopic pharmaceutical composition may comprise a pharmaceutically acceptable carrier and combination of motif-bearing peptides that are immunologically cross-reactive with HCV-1 peptides, the peptides from multiple domains of HCV, wherein at least one of the peptides bears a motif of Table Ia, and wherein the combination of motif-bearing peptides consists essentially of: a) one or more peptides comprising at least 8 amino acids from a C domain; and, b) one or more peptides comprising at least 8 amino acids from an S, NS3, NS4, or NS5 domain, and, one HCV peptide comprising at least 8 amino acids of an envelope domain. Such a composition may further comprise one or more HCV motif-bearing peptides comprising at least 8 amino acids of an X domain.

[0208] Alternatively, a pharmaceutical composition of the invention may comprise: a) a pharmaceutically acceptable carrier; and, b) a combination of one or more motif-bearing peptides of at least 8 amino acids derived from one or more hepatitis C virus (HCV) domains, wherein said peptides are cross-reactive with peptides of HCV-1, with a proviso that the combination does not include a peptide of at least 8 amino acids from an HCV C domain, and wherein at least one of the peptides bears a motif of Table Ia, said domains selected from the group consisting of: an S domain; an NS3 domain; an NS4 domain; an NS5 domain; and, an X domain. Such a composition may additionally comprise motif-bearing HCV envelope peptide(s) consisting of one or more copies of a single HCV peptide comprising at least 8 amino acids of an envelope domain.

[0209] Lastly, an embodiment of the invention may comprise a pharmaceutical composition comprising a pharmaceutically acceptable carrier and combination of two or more motif-bearing peptides from a single domain of an HCV-1 strain, said peptides immunologically cross-reactive with peptides of an HCV-1 antigen, wherein at least one of the peptides bears a motif of Table Ia, and the peptides are derived from HCV, and the HCV domain is selected from the group consisting of: a C domain; an S domain; an NS3 domain; an NS4 domain; an NS5 domain; an X domain; or, an envelope domain from a single HCV strain, with a proviso that the envelope domain is other than a variable envelope domain.

[0210] In the embodiments set forth, “peptides immunologically cross-reactive with HCV-1” refers to peptides that are bound by the same antibody; “derived from” refers to a fragment or subsequence and conservatively modified variants thereof.

### IV.K.1. Minigene Vaccines

[0211] A growing body of experimental evidence demonstrates that a number of different approaches are available which allow simultaneous delivery of multiple epitopes. Nucleic acids encoding the peptides of the invention are a particularly useful embodiment of the invention. Epitopes for inclusion in a minigene are preferably selected according to the guidelines set forth in the previous section. A preferred means of administering nucleic acids encoding the peptides of the invention uses minigene constructs encoding a peptide comprising one or multiple epitopes of the invention. The use of multi-epitope minigenes is described below and in, e.g., co-pending application U.S. Ser. No. 09/311,784; An, L. and Whitton, J. L., J. Virol. 71:2292, 1997; Thomson, S. A. et al., J. Immunol. 157:822, 1996; Whitton, J. L. et al., J. Virol. 67:348, 1993; Hanke, R. et al., Vaccine 16:426, 1998. For example, a multi-epitope DNA plasmid encoding nine dominant HLA-A*0201- and A11-restricted epitopes derived from the polymerase, envelope, and core proteins of HBV and human immunodeficiency virus (HIV), the PADRE™ universal helper T cell (HTL) epitope, and an endoplasmic reticulum-translocating signal sequence was engineered. Immunization of HLA transgenic mice with this plasmid construct resulted in strong CTL induction responses against the nine epitopes tested, similar to those observed with a lipopeptide of known immunogenicity in humans, and significantly greater than immunization in oil-based adjuvants. Moreover, the immunogenicity of DNA-encoded epitopes in vivo correlated with the in vitro responses of specific CTL lines against target cells transfected with the DNA plasmid. Thus, these data show that the minigene served to both: 1.) generate a CTL response and 2.) that the induced CTLs recognized cells expressing the encoded epitopes. A similar approach may be used to develop minigenes encoding HCV epitopes.

[0212] For example, to create a DNA sequence encoding the selected epitopes (minigene) for expression in human cells, the amino acid sequences of the epitopes may be reverse translated. A human codon usage table can be used to guide the codon choice for each amino acid. These epitope-encoding DNA sequences may be directly adjoined, so that when translated, a continuous polypeptide sequence is created. To optimize expression and/or immunogenicity, additional elements can be incorporated into the minigene design. Examples of amino acid sequences that can be reverse translated and included in the minigene sequence include: HLA class I epitopes, HLA class II epitopes, a ubiquitination signal sequence, and/or an endoplasmic reticulum targeting signal. In addition, HLA presentation of CTL and HTL epitopes may be improved by including synthetic (e.g. poly-alanine) or naturally-occurring flanking sequences adjacent to the CTL or HTL epitopes; these larger peptides comprising the epitope(s) are within the scope of the invention.

[0213] The minigene sequence may be converted to DNA by assembling oligonucleotides that encode the plus and minus strands of the minigene. Overlapping oligonucleotides (30-100 bases long) may be synthesized, phosphorylated, purified and annealed under appropriate conditions using well known techniques. The ends of the oligonucleotides can be joined, for example, using T4 DNA ligase. This synthetic minigene, encoding the epitope polypeptide, can then be cloned into a desired expression vector.

[0214] Standard regulatory sequences well known to those of skill in the art are preferably included in the vector to ensure expression in the target cells. Several vector elements are desirable: a promoter with a down-stream cloning site for minigene insertion; a polyadenylation signal for efficient transcription termination; an E. coli origin of replication; and an E. coli selectable marker (e.g. ampicillin or kanamycin resistance). Numerous promoters can be used for this purpose, e.g., the human cytomegalovirus (hCMV) promoter. See, e.g., U.S. Pat. Nos. 5,580,859 and 5,589,466 for other suitable promoter sequences.

[0215] Additional vector modifications may be desired to optimize minigene expression and immunogenicity. In some cases, introns are required for efficient gene expression, and one or more synthetic or naturally-occurring introns could be incorporated into the transcribed region of the minigene. The inclusion of mRNA stabilization sequences and sequences for replication in mammalian cells may also be considered for increasing minigene expression.

[0216] Once an expression vector is selected, the minigene is cloned into the polylinker region downstream of the promoter. This plasmid is transformed into an appropriate E. coli strain, and DNA is prepared using standard techniques. The orientation and DNA sequence of the minigene, as well as all other elements included in the vector, are confirmed using restriction mapping and DNA sequence analysis. Bacterial cells harboring the correct plasmid can be stored as a master cell bank and a working cell bank.

[0217] In addition, immunostimulatory sequences (ISSs or CpGs) appear to play a role in the immunogenicity of DNA vaccines. These sequences may be included in the vector, outside the minigene coding sequence, if desired to enhance immunogenicity.

[0218] In some embodiments, a bi-cistronic expression vector which allows production of both the minigene-encoded epitopes and a second protein (included to enhance or decrease immunogenicity) can be used. Examples of proteins or polypeptides that could beneficially enhance the immune response if co-expressed include cytokines (e.g., IL-2, IL-12, GM-CSF), cytokine-inducing molecules (e.g., LeIF), costimulatory molecules, or for HTL responses, pan-DR binding proteins (PADRE™, Epimmune, San Diego, Calif.) Helper (HTL) epitopes can be joined to intracellular targeting signals and expressed separately from expressed CTL epitopes; this allows direction of the HTL epitopes to a cell compartment different than that of the CTL epitopes. If required, this could facilitate more efficient entry of HTL epitopes into the HLA class II pathway, thereby improving HTL induction. In contrast to HTL or CTL induction, specifically decreasing the immune response by co-expression of immunosuppressive molecules (e.g. TGF-β) may be beneficial in certain diseases.

[0219] Therapeutic quantities of plasmid DNA can be produced for example, by fermentation in E. coli, followed by purification. Aliquots from the working cell bank are used to inoculate growth medium, and grown to saturation in shaker flasks or a bioreactor according to well known techniques. Plasmid DNA can be purified using standard bioseparation technologies such as solid phase anion-exchange resins supplied by QIAGEN, Inc. (Valencia, Calif.). If required, supercoiled DNA can be isolated from the open circular and linear forms using gel electrophoresis or other methods.

[0220] Purified plasmid DNA can be prepared for injection using a variety of formulations. The simplest of these is reconstitution of lyophilized DNA in sterile phosphate-buffer saline (PBS). This approach, known as “naked DNA,” is currently being used for intramuscular (IM) administration in clinical trials. To maximize the immunotherapeutic effects of minigene DNA vaccines, an alternative method for formulating purified plasmid DNA may be desirable. A variety of methods have been described, and new techniques may become available. Cationic lipids can also be used in the formulation (see, e.g., as described by WO 93/24640; Mannino & Gould-Fogerite, BioTechniques 6(7): 682 (1988); U.S. Pat. No. 5,279,833; WO 91/06309; and Felgner, et al., Proc. Nat'l Acad. Sci. USA 84:7413 (1987). In addition, glycolipids, fusogenic liposomes, peptides and compounds referred to collectively as protective, interactive, non-condensing compounds (PINC) could also be complexed to purified plasmid DNA to influence variables such as stability, intramuscular dispersion, or trafficking to specific organs or cell types.

[0221] Target cell sensitization can be used as a functional assay for expression and HLA class I presentation of minigene-encoded CTL epitopes. For example, the plasmid DNA is introduced into a mammalian cell line that is suitable as a target for standard CTL chromium release assays. The transfection method used will be dependent on the final formulation. Electroporation can be used for “naked” DNA, whereas cationic lipids allow direct in vitro transfection. A plasmid expressing green fluorescent protein (GFP) can be co-transfected to allow enrichment of transfected cells using fluorescence activated cell sorting (FACS). These cells are then chromium-51 (⁵¹Cr) labeled and used as target cells for epitope-specific CTL lines; cytolysis, detected by ⁵¹Cr release, indicates both production of, and HLA presentation of, minigene-encoded CTL epitopes. Expression of HTL epitopes may be evaluated in an analogous manner using assays to assess HTL activity.

[0222] In vivo immunogenicity is a second approach for functional testing of minigene DNA formulations. Transgenic mice expressing appropriate human HLA proteins are immunized with the DNA product. The dose and route of administration are formulation dependent (e.g., IM for DNA in PBS, intraperitoneal (IP) for lipid-complexed DNA). Twenty-one days after immunization, splenocytes are harvested and restimulated for 1 week in the presence of peptides encoding each epitope being tested. Thereafter, for CTL effector cells, assays are conducted for cytolysis of peptide-loaded, ⁵¹Cr-labeled target cells using standard techniques. Lysis of target cells that were sensitized by HLA loaded with peptide epitopes, corresponding to minigene-encoded epitopes, demonstrates DNA vaccine function for in vivo induction of CTLs. Immunogenicity of HTL epitopes is evaluated in transgenic mice in an analogous manner.

[0223] Alternatively, the nucleic acids can be administered using ballistic delivery as described, for instance, in U.S. Pat. No. 5,204,253. Using this technique, particles comprised solely of DNA are administered. In a further alternative embodiment, DNA can be adhered to particles, such as gold particles.

IV.K2. Combinations of CTL Peptides with Helper Peptides

[0224] Vaccine compositions comprising the peptides of the present invention, or analogs thereof, which have immunostimulatory activity may be modified to provide desired attributes, such as improved serum half life, or to enhance immunogenicity.

[0225] For instance, the ability of the peptides to induce CTL activity can be enhanced by linking the peptide to a sequence which contains at least one epitope that is capable of inducing a T helper cell response. The use of T helper epitopes in conjunction with CTL epitopes to enhance immunogenicity is illustrated, for example, in co-pending U.S. Ser. No. 08/820,360, U.S. Ser. No. 08/197,484, and U.S. Ser. No. 08/464,234.

[0226] Particularly preferred CTL epitope/HTL epitope conjugates are linked by a spacer molecule. The spacer is typically comprised of relatively small, neutral molecules, such as amino acids or amino acid mimetics, which are substantially uncharged under physiological conditions. The spacers are typically selected from, e.g., Ala, Gly, or other neutral spacers of nonpolar amino acids or neutral polar amino acids. It will be understood that the optionally present spacer need not be comprised of the same residues and thus may be a hetero- or homo-oligomer. When present, the spacer will usually be at least one or two residues, more usually three to six residues. Alternatively, the CTL peptide may be linked to the T helper peptide without a spacer.

[0227] The CTL peptide epitope may be linked to the T helper peptide epitope either directly or via a spacer either at the amino or carboxy terminus of the CTL peptide. The amino terminus of either the immunogenic peptide or the T helper peptide may be acylated. The HTL peptide epitopes used in the invention can be modified in the same manner as CTL peptides. For instance, they may be modified to include D-amino acids or be conjugated to other molecules such as lipids, proteins, sugars and the like. Exemplary T helper peptides include tetanus toxoid 830-843, influenza 307-319, and malarial circumsporozoite 382-398 and 378-398.

[0228] In certain embodiments, the T helper peptide is one that is recognized by T helper cells present in the majority of the population. This can be accomplished by selecting amino acid sequences that bind to many, most, or all of the HLA class II molecules. These are known as “loosely HLA-restricted” or “promiscuous” T helper sequences. Examples of amino acid sequences that are promiscuous include sequences from antigens such as tetanus toxoid at positions 830-843 (QYIKANSKFIGITE), Plasmodium falciparum CS protein at positions 378-398 (DIEKKIAKMEKASSVFNVVNS), and Streptococcus 18 kD protein at positions 116 (GAVDSILGGVATYGAA). Other examples include peptides bearing a DR 1-4-7 supermotif, or either of the DR3 motifs.

[0229] Alternatively, it is possible to prepare synthetic peptides capable of stimulating T helper lymphocytes, in a loosely HLA-restricted fashion, using amino acid sequences not found in nature (see, e.g., PCT publication WO 95/07707). These synthetic compounds called Pan-DR-binding epitopes (e.g., PADRE™, Epimmune, Inc., San Diego, Calif.) are designed to most preferrably bind most HLA-DR (human HLA class II) molecules. For instance, a pan-DR-binding epitope peptide having the formula: aKXVWANTLKAAa, where “X” is either cyclohexylalanine, phenylalanine, or tyrosine, and a is either D-alanine or L-alanine, has been found to bind to most HLA-DR alleles, and to stimulate the response of T helper lymphocytes from most individuals, regardless of their HLA type. An alternative of a pan-DR binding epitope comprises all “L” natural amino acids and can be provided in the form of nucleic acids that encode the epitope.

[0230] HTL peptide epitopes can also be modified to alter their biological properties. For example, peptides comprising HTL epitopes can contain D-amino acids to increase their resistance to proteases and thus extend their serum half-life. Also, the epitope peptides of the invention can be conjugated to other molecules such as lipids, proteins or sugars, or any other synthetic compounds, to increase their biological activity. Specifically, the T helper peptide can be conjugated to one or more palmitic acid chains at either the amino or carboxyl termini.

[0231] In some embodiments it may be desirable to include in the pharmaceutical compositions of the invention at least one component which primes cytotoxic T lymphocytes. Lipids have been identified as agents capable of priming CTL in vivo against viral antigens. For example, palmitic acid residues can be attached to the ε- and α-amino groups of a lysine residue and then linked, e.g., via one or more linking residues such as Gly, Gly-Gly-, Ser, Ser-Ser, or the like, to an immunogenic peptide. The lipidated peptide can then be administered either directly in a micelle or particle, incorporated into a liposome, or emulsified in an adjuvant, e.g., incomplete Freund's adjuvant. In a preferred embodiment, a particularly effective immunogenic comprises palmitic acid attached to ε- and α-amino groups of Lys, which is attached via linkage, e.g., Ser-Ser, to the amino terminus of the immunogenic peptide. As another example of lipid priming of CTL responses, E. coli lipoproteins, such as tripalmitoyl-S-glycerylcysteinlyseryl-serine (P₃CSS) can be used to prime virus specific CTL when covalently attached to an appropriate peptide. (See, e.g., Deres, et al., Nature 342:561, 1989). Peptides of the invention can be coupled to P₃CSS, for example, and the lipopeptide administered to an individual to specifically prime a CTL response to the target antigen. Moreover, because the induction of neutralizing antibodies can also be primed with P₃CSS-conjugated epitopes, two such compositions can be combined to more effectively elicit both humoral and cell-mediated responses to infection.

[0232] As noted herein, additional amino acids can be added to the termini of a peptide to provide for ease of linking peptides one to another, for coupling to a carrier support or larger peptide, for modifying the physical or chemical properties of the peptide or oligopeptide, or the like. Amino acids such as tyrosine, cysteine, lysine, glutamic or aspartic acid, or the like, can be introduced at the C- or N-terminus of the peptide or oligopeptide, particularly class I peptides. However, it is to be noted that modification at the carboxyl terminus of a CTL epitope may, in some cases, alter binding characteristics of the peptide. In addition, the peptide or oligopeptide sequences can differ from the natural sequence by being modified by terminal-NH₂ acylation, e.g., by alkanoyl (C₁-C₂₀) or thioglycolyl acetylation, terminal-carboxyl amidation, e.g., ammonia, methylamine, etc. In some instances these modifications may provide sites for linking to a support or other molecule.

### IV.L. Administration of Vaccines for Therapeutic or Prophylactic Purposes

[0233] The peptides of the present invention and pharmaceutical and vaccine compositions of the invention are useful for administration to mammals, particularly humans, to treat and/or prevent HCV infection. Vaccine compositions containing the peptides of the invention are administered to a patient infected with HCV or to an individual susceptible to, or otherwise at risk for, HCV infection to elicit an immune response against HCV antigens and thus enhance the patient's own immune response capabilities. In therapeutic applications, peptide and/or nucleic acid compositions are administered to a patient in an amount sufficient to elicit an effective CTL and/or HTL response to the virus antigen and to cure or at least partially arrest or slow symptoms and/or complications. An amount adequate to accomplish this is defined as “therapeutically effective dose.” Amounts effective for this use will depend on, e.g., the particular composition administered, the manner of administration, the stage and severity of the disease being treated, the weight and general state of health of the patient, and the judgment of the prescribing physician.

[0234] The vaccine compositions of the invention may also be used purely as prophylactic agents. Generally the dosage for an initial prophylactic immunization generally occurs in a unit dosage range where the lower value is about 1, 5, 50, 500, or 1000 μg and the higher value is about 10,000; 20,000; 30,000; or 50,000 μg. Dosage values for a human typically range from about 500 μg to about 50,000 μg per 70 kilogram patient. This is followed by boosting dosages of between about 1.0 μg to about 50,000 μg of peptide administered at defined intervals from about four weeks to six months after the initial administration of vaccine. The immunogenicity of the vaccine may be assessed by measuring the specific activity of CTL and HTL obtained from a sample of the patient's blood.

[0235] As noted above, peptides comprising CTL and/or HTL epitopes of the invention induce immune responses when presented by HLA molecules and contacted with a CTL or HTL specific for an epitope comprised by the peptide. The manner in which the peptide is contacted with the CTL or HTL is not critical to the invention. For instance, the peptide can be contacted with the CTL or HTL either in vivo or in vitro. If the contacting occurs in vivo, the peptide itself can be administered to the patient, or other vehicles, e.g., DNA vectors encoding one or more peptides, viral vectors encoding the peptide(s), liposomes and the like, can be used, as described herein.

[0236] For pharmaceutical compositions, the immunogenic peptides of the invention, or DNA encoding them, are generally administered to an individual already infected with HCV. The peptides or DNA encoding them can be administered individually or as fusions of one or more peptide sequences. Those in the incubation phase or the acute phase of infection can be treated with the immunogenic peptides separately or in conjunction with other treatments, as appropriate.

[0237] For therapeutic use, administration should generally begin at the first diagnosis of HCV infection. This is followed by boosting doses until at least symptoms are substantially abated and for a period thereafter. In chronic infection, loading doses followed by boosting doses may be required.

[0238] Treatment of an infected individual with the compositions of the invention may hasten solution of the infection in acutely infected individuals. For those individuals susceptible (or predisposed) to developing chronic infection, the compositions are particularly useful in methods for preventing the evolution from acute to chronic infection. Where susceptible individuals are identified prior to or during infection, the composition can be targeted to them, thus minimizing the need for administration to a larger population.

[0239] The peptide or other compositions used for the treatment or prophylaxis of HCV infection can be used, e.g., in persons who have not manifested symptoms of disease but who act as a disease vector. In this context, it is generally important to provide an amount of the peptide epitope delivered by a mode of administration sufficient to effectively stimulate a cytotoxic T cell response; compositions which stimulate helper T cell responses can also be given in accordance with this embodiment of the invention.

[0240] The dosage for an initial therapeutic immunization generally occurs in a unit dosage range where the lower value is about 1, 5, 50, 500, or 1000 μg and the higher value is about 10,000; 20,000; 30,000; or 50,000 μg. Dosage values for a human typically range from about 500 μg to about 50,000 μg per 70 kilogram patient. Boosting dosages of between about 1.0 μg to about 50000 μg of peptide pursuant to a boosting regimen over weeks to months may be administered depending upon the patient's response and condition as determined by measuring the specific activity of CTL and HTL obtained from the patient's blood. The peptides and compositions of the present invention may be employed in serious disease states, that is, life-threatening or potentially life threatening situations. In such cases, as a result of the minimal amounts of extraneous substances and the relative nontoxic nature of the peptides in preferred compositions of the invention, it is possible and may be felt desirable by the treating physician to administer substantial excesses of these peptide compositions relative to these stated dosage amounts.

[0241] Thus, for treatment of chronic infection, a representative dose is in the range disclosed above, namely where the lower value is about 1, 5, 50, 500, or 1000 μg and the higher value is about 10,000; 20,000; 30,000; or 50,000 μg, preferably from about 500 μg to about 50,000 μg per 70 kilogram patient. Initial doses followed by boosting doses at established intervals, e.g., from four weeks to six months, may be required, possibly for a prolonged period of time to effectively immunize an individual. In the case of chronic infection, administration should continue until at least clinical symptoms or laboratory tests indicate that the viral infection has been eliminated or substantially abated and for a period thereafter. The dosages, routes of administration, and dose schedules are adjusted in accordance with methodologies known in the art.

[0242] The pharmaceutical compositions for therapeutic treatment are intended for parenteral, topical, oral, intrathecal, or local administration. Preferably, the pharmaceutical compositions are administered, parentally, e.g., intravenously, subcutaneously, intradermally, or intramuscularly. Thus, the invention, provides compositions for parenteral administration which comprise a solution of the immunogenic peptides dissolved or suspended in an acceptable carrier, preferably an aqueous carrier. A variety of aqueous carriers may be used, e.g., water, buffered water, 0.8% saline, 0.3% glycine, hyaluronic acid and the like. These compositions may be sterilized by conventional, well known sterilization techniques, or may be sterile filtered. The resulting aqueous solutions may be packaged for use as is, or lyophilized, the lyophilized preparation being combined with a sterile solution prior to administration. The compositions may contain pharmaceutically acceptable auxiliary substances as required to approximate physiological conditions, such as pH-adjusting and buffering agents, tonicity adjusting agents, wetting agents, preservatives, and the like, for example, sodium acetate; sodium lactate, sodium chloride, potassium chloride, calcium chloride, sorbitan monolaurate, triethanolamine oleate, etc.

[0243] The concentration of peptides of the invention in the pharmaceutical formulations can vary widely, i.e., from less than about 0.1%, usually at or at least about 2% to as much as 20% to 50% or more by weight, and will be selected primarily by fluid volumes, viscosities, etc., in accordance with the particular mode of administration selected.

[0244] A human unit dose form of the peptide composition is typically included in a pharmaceutical composition that comprises a human unit dose of an acceptable carrier, preferably an aqueous carrier, and is administered in a volume of fluid that is known by those of skill in the art to be used for administration of such compositions to humans (see, e.g., Remington's Pharmaceutical Sciences, 17^{th} Edition, A. Gennaro, Editor, Mack Publishing Co., Easton, Pa., 1985).

[0245] The peptides of the invention may also be administered via liposomes, which serve to target the peptides to a particular tissue, such as lymphoid tissue, or to target selectively to infected cells, as well as to increase the half-life of the peptide composition. Liposomes include emulsions, foams, micelles, insoluble monolayers, liquid crystals, phospholipid dispersions, lamellar layers and the like. In these preparations, the peptide to be delivered is incorporated as part of a liposome, alone or in conjunction with a molecule which binds to a receptor prevalent among lymphoid cells, such as monoclonal antibodies which bind to the CD45 antigen, or with other therapeutic or immunogenic compositions. Thus, liposomes either filled or decorated with a desired peptide of the invention can be directed to the site of lymphoid cells, where the liposomes then deliver the peptide compositions. Liposomes for use in accordance with the invention are formed from standard vesicle-forming lipids, which generally include neutral and negatively charged phospholipids and a sterol, such as cholesterol. The selection of lipids is generally guided by consideration of, e.g., liposome size, acid liability and stability of the liposomes in the blood stream. A variety of methods are available for preparing liposomes, as described in, e.g., Szoka, et al., Ann. Rev. Biophys. Bioeng. 9:467 (1980), and U.S. Pat. Nos. 4,235,871, 4,501,728, 4,837,028, and 5,019,369.

[0246] For targeting cells of the immune system, a ligand to be incorporated into the liposome can include, e.g., antibodies or fragments thereof specific for cell surface determinants of the desired immune system cells. A liposome suspension containing a peptide may be administered intravenously, locally, topically, etc. in a dose which varies according to, inter alia, the manner of administration, the peptide being delivered, and the stage of the disease being treated.

[0247] For solid compositions, conventional nontoxic solid carriers may be used which include, for example, pharmaceutical grades of mannitol, lactose, starch, magnesium stearate, sodium saccharin, talcum, cellulose, glucose, sucrose, magnesium carbonate, and the like. For oral administration, a pharmaceutically acceptable nontoxic composition is formed by incorporating any of the normally employed excipients, such as those carriers previously listed, and generally 10-95% of active ingredient, that is, one or more peptides of the invention, and more preferably at a concentration of 25%-75%.

[0248] For aerosol administration, the immunogenic peptides are preferably supplied in finely divided form along with a surfactant and propellant. Typical percentages of peptides are 0.01%-20% by weight, preferably 1%-10%. The surfactant must, of course, be nontoxic, and preferably soluble in the propellant. Representative of such agents are the esters or partial esters of fatty acids containing from 6 to 22 carbon atoms, such as caproic, octanoic, lauric, palmitic, stearic, linoleic, linolenic, olesteric and oleic acids with an aliphatic polyhydric alcohol or its cyclic anhydride. Mixed esters, such as mixed or natural glycerides may be employed. The surfactant may constitute 0.1%-20% by weight of the composition, preferably 0.25-5%. The balance of the composition is ordinarily propellant. A carrier can also be included, as desired, as with, e.g., lecithin for intranasal delivery.

### IV.M. Kits

[0249] The peptide and nucleic acid compositions of this invention can be provided in kit form together with instructions for vaccine administration. Typically the kit would include desired peptide compositions in a container, preferably in unit dosage form and instructions for administration. An alternative kit would include a minigene construct with desired nucleic acids of the invention in a container, preferably in unit dosage form together with instructions for administration. Lymphokines such as IL-2 or IL-12 may also be included in the kit. Other kit components that may also be desirable include, for example, a sterile syringe, booster dosages, and other desired excipients.

[0250] The invention will be described in greater detail by way of specific examples. The following examples are offered for illustrative purposes, and are not intended to limit the invention in any manner. Those of skill in the art will readily recognize a variety of non-critical parameters that can be changed or modified to yield alternative embodiments in accordance with the invention.

### V. EXAMPLES

[0251] As in many viral diseases, there is evidence that clearance of HCV is mediated by CTL. In a study of primary HCV infection in six chimpanzees, four progressed to chronic infection (Cooper et al., abstract, 19^{th} US-Japan Hepatitis Joint Panel Meeting, Jan. 27-29, 1998). It was found that these four animals showed either no CTL response or a very narrowly focused response during early infection. In contrast, in the remaining two animals that resolved the infection, a broad CTL response was observed against multiple HCV proteins, some of which were conserved. Weiner et al. (Proc. Natl. Acad. Sci. USA 92:2755-2759, 1995) demonstrated that viral escape, in which the epitopes presented to PATR class I molecules mutated, was linked with a progression toward chronic infection. These data show a role for the CTL in directing the course of HCV disease, and in shaping the genetic composition of HCV species in the persistently infected host.

[0252] In work in humans, Koziel and co-workers have established the presence of HCV-specific CTL in liver infiltrates from patients with chronic HCV infection (Koziel et al., J. Immunol. 149:3339, 1992; and Koziel et al.; J. Virol. 67:7522, 1993), and have also identified a number of CTL epitopes recognized in the context of several different HLA class I molecules. Other investigators have shown that HCV-specific CTL can be detected in the peripheral blood of patients with chronic hepatitis C (Cerny et al., J. Clin. Invest. 95:521, 1995; Cerny et al., Curr. Topics in Micro. and Immunol 189:169, 1994; Cerny et al., Abst. 2^{nd} International Meeting on Hepatitis C and Related Viruses; La Jolla, Calif., 1994; Battegay et al., Abst. 2^{nd} International Meeting on Hepatitis C and Related Viruses; La Jolla, Calif., 1994; Shirai et al., J. Virol. 68:3334, 1994; Shirai et al., J. Immunol. 154:2733, 1995; Battegay et al., J. Virol. 69:2462, 1995). In addition, escape variants have been demonstrated in patients chronically infected with HCV (Chang et al., J. Clin. Invest. 100:2376-2385, 1997; Tsai et al., Gastroenterology 115:954-966, 1998).

[0253] The magnitude of the CTL responses observed in HCV-infected patients is, in general, higher than those observed in the case of chronic hepatitis B infection, suggesting that there is less impairment of specific T cell immunity than with HBV infection. The magnitude of CTL responses in HCV patients is, however, lower than those observed in HBV infected individuals who successfully cleared HBV infection. These results support the understanding that HCV infected patients are capable of responding to active immunotherapy, and suggest that potentiation and increasing of T cell responses to HCV may be of use in therapy and prevention of chronic HCV infection (Prince, A. M. FEMS Micro. Rev. 14:273, 1994).

[0254] Several groups have analyzed the potential role of HCV-specific CTL responses in disease resistance and pathogenesis. In some studies no correlation was found between CTL viremia and CTL precursor frequency for individual HCV epitopes (Rehermann et al., J. Clin. Invest. 98:1432-1440, 1996; Wong et al., J. Immunol. 160:1479-1488, 1998). In other studies, however, it was shown that a clear correlation existed between levels of HCV infection and CTL responses, provided that the global response against multiple CTL epitopes was considered (Rehermann et al., J. Virol. 70:7092-7102, 1996). These data represent a strong rationale for development of vaccine constructs capable of inducing vigorous CTL responses directed against a multiplicity of conserved HCV-derived epitopes.

[0255] Koziel and colleagues have demonstrated the presence of HCV-specific CTLs, as well as T helper cell responses, in exposed but seronegative individuals (Koziel et al., J. Infect. Diseases 176:859-866, 1997). In addition, HCV-specific CTLs have been detected in healthy, seronegative family members of chronically HCV-infected patents, indicating that a protective immunity is established in absence of a detectable infection (Bronowicki et al., J. Infect. Dis. 176:518-522, 1997; Scognamiglio et al., in preparation).

[0256] Experimental evidence also indicates that HTL epitopes play an important role in immune reactivity and defenses against HCV infection (Missale et al., J. Clin. Invest. 98:706-714, 1996). Diepolder et al. (in Lancet 346:1006, 1995) have shown that a region of the NS3 gene (NS3 1007-1534) is recognized by patients who clear acute HCV infection, but is not seen by patients who develop chronic infection. Subsequent studies have shown that this particular region contained a highly cross-reactive HTL epitope (NS3 1248-1261), which binds with good affinity to 10 of 13 DR molecules tested, and is highly conserved in 30/33 different HCV isolates considered (Diepolder et al., J. Virol. 71:6011-6019, 1997). These data suggest that directing HTL responses to this type of epitope (rather than to less cross-reactive and/or highly variable ones) will be of therapeutic and prophylactic benefit and strongly argue for inclusion of this and other epitopes with similar characteristics in HCV vaccine constructs.

[0257] The following examples illustrate identification, selection, and use of immunogenic Class I and Class II peptide epitopes for inclusion in vaccine compositions.

### Example 1

### HLA Class I and Class II Binding Assays

[0258] The following example of peptide binding to HLA molecules demonstrates quantification of binding affinities of HLA class I and class II peptides. Binding assays can be performed with peptides that are either motif-bearing or not motif-bearing.

[0259] Epstein-Barr virus (EBV)-transformed homozygous cell lines, fibroblasts, CIR, or 721.22 transfectants were used as sources of HLA class I molecules. These cells were maintained in vitro by culture in RPMI 1640 medium supplemented with 2 mM L-glutamine (GIBCO, Grand Island, N.Y.), 50 μM 2-ME, 100 μg/ml of streptomycin,
[0260] U/ml of penicillin (Irvine Scientific) and 10% heat-inactivated FCS (Irvine Scientific, Santa Ana, Calif.). Cells were grown in 225-cm² tissue culture flasks or, for large-scale cultures, in roller bottle apparatuses. The specific cell lines routinely used for purification of MHC class I and class II molecules are listed in Table XXIV.

[0261] Cell lysates were prepared and HLA molecules purified in accordance with disclosed protocols (Sidney et al., Current Protocols in Immunology 18.3.1 (1998); Sidney, et al., J. Immunol. 154:247 (1995); Sette, et al., Mol. Immunol. 31:813 (1994)). Briefly, cells were lysed at a concentration of 10⁸ cells/ml in 50 mM Tris-HCl, pH 8.5, containing 1% Nonidet P-40 (Fluka Biochemika, Buchs, Switzerland), 150 mM NaCl, 5 mM EDTA, and 2 mM PMSF. Lysates were cleared of debris and nuclei by centrifugation at 15,000×g for 30 min.

[0262] HLA molecules were purified from lysates by affinity chromatography. Lysates prepared as above were passed twice through two pre-columns of inactivated Sepharose CL4-B and protein A-Sepharose. Next, the lysate was passed over a column of Sepharose CL-4B beads coupled to an appropriate antibody. The antibodies used for the extraction of HLA from cell lysates are listed in Table XXV. The anti-HLA column was then washed with 10-column volumes of 10 mM Tris-HCL, pH 8.0, in 1% NP-40, PBS, 2-column volumes of PBS, and 2-column volumes of PBS containing 0.4% n-octylglucoside. Finally, MHC molecules were eluted with 50 mM diethylamine in 0.15M NaCl containing 0.4% n-octylglucoside, pH 11.5. A 1/25 volume of 2.0M Tris, pH 6.8, was added to the eluate to reduce the pH to ˜8.0. Eluates were then be concentrated by centrifugation in Centriprep 30 concentrators at 2000 rpm (Amicon, Beverly, Mass.). Protein content was evaluated by a BCA protein assay (Pierce Chemical Co., Rockford, Ill.) and confirmed by SDS-PAGE.

[0263] A detailed description of the protocol utilized to measure the binding of peptides to Class I and Class II MHC has been published (Sette et al., Mol. Immunol. 31:813, 1994; Sidney et al., in Current Protocols in Immunology, Margulies, Ed., John Wiley & Sons, New York, Section 18.3, 1998). Briefly, purified MHC molecules (5 to 500 nM) were incubated with various unlabeled peptide inhibitors and 1-10 nM ¹²⁵I-radiolabeled probe peptides for 48 h in PBS containing 0.05% Nonidet P-40 (NP40) (or 20% w/v digitonin for H-2 IA assays) in the presence of a protease inhibitor cocktail. The final concentrations of protease inhibitors (each from CalBioChem, La Jolla, Calif.) were 1 mM PMSF, 1.3 nM 1.10 phenanthroline, 73 μM pepstatin A, 8 mM EDTA, 6 mM N-ethylmaleimide (for Class II assays), and 200 μM N alpha-p-tosyl-L-lysine chloromethyl ketone (TLCK). All assays were performed at pH 7.0 with the exception of DRB1*0301, which was performed at pH 4.5, and DRB1*1601 (DR2w21β₁) and DRB4*0101 (DRw53), which were performed at pH 5.0. pH was adjusted as described elsewhere (see Sidney et al., in Current Protocols in Immunology, Margulies, Ed., John Wiley & Sons, New York, Section 18.3, 1998).

[0264] Following incubation, MHC-peptide complexes were separated from free peptide by gel filtration on 7.8 mm×15 cm TSK200 columns (TosoHaas 16215, Montgomeryville, Pa.), eluted at 1.2 mls/min with PBS pH 6.5 containing 0.5% NP40 and 0.1% NaN₃. Because the large size of the radiolabeled peptide used for the DRB1*1501 (DR2w2β₁) assay makes separation of bound from unbound peaks more difficult under these conditions, all DRB1*1501 (DR2w2β₁) assays were performed using a 7.8 mm×30 cm TSK2000 column eluted at 0.6 mls/min. The eluate from the TSK columns was passed through a Beckman 170 radioisotope detector, and radioactivity was plotted and integrated using a Hewlett-Packard 3396A integrator, and the fraction of peptide bound was determined.

[0265] Radiolabeled peptides were iodinated using the chloramine-T method. Representative radiolabeled probe peptides utilized in each assay, and its assay specific IC₅₀ nM, are summarized in Tables IV and V. Typically, in preliminary experiments, each MHC preparation was titered in the presence of fixed amounts of radiolabeled peptides to determine the concentration of HLA molecules necessary to bind 10-20% of the total radioactivity. All subsequent inhibition and direct binding assays were performed using these HLA concentrations.

[0266] Since under these conditions [label]<[HLA] and IC₅₀≧[HLA], the measured IC₅₀ values are reasonable approximations of the true K_{D} values. Peptide inhibitors are typically tested at concentrations ranging from 120 μg/ml to 1.2 ng/ml, and are tested in two to four completely independent experiments. To allow comparison of the data obtained in different experiments, a relative binding figure is calculated for each peptide by dividing the IC₅₀ of a positive control for inhibition by the IC₅₀ for each tested peptide (typically unlabeled versions of the radiolabeled probe peptide). For database purposes, and inter-experiment comparisons, relative binding values are compiled. These values can subsequently be converted back into IC₅₀ nM values by dividing the IC₅₀ nM of the positive controls for inhibition by the relative binding of the peptide of interest. This method of data compilation has proven to be the most accurate and consistent for comparing peptides that have been tested on different days, or with different lots of purified MHC.

[0267] Because the antibody used for HLA-DR purification (LB3.1) is α-chain specific, β₁ molecules are not separated from β₃ (and/or β₄ and β₅) molecules. The β₁ specificity of the binding assay is obvious in the cases of DRB1*0101 (DR1), DRB1*0802 (DR8w2), and DRB1*0803 (DR8w3), where no β₃ is expressed. It has also been demonstrated for DRB1*0301 (DR3) and DRB3*0101 (DR52a), DRB1*0401 (DR4w4), DRB1*0404 (DR4w14), DRB1*0405 (DR4w15), DRB1*L101 (DR5), DRB1*1201 (DR5w12), DRB1*1302 (DR6w19) and DRB1*0701 (DR7). The problem of P chain specificity for DRB1*1501 (DR2w2β₁), DRB5*0101 (DR2w2β₂), DRB1*1601 (DR2w21β₁), DRB5*0201 (DR51Dw21), and DRB4*0101 (DRw53) assays is circumvented by the use of fibroblasts. Development and validation of assays with regard to DRβ molecule specificity have been described previously (see, e.g., Southwood et al., J. Immunol. 160:3363-3373, 1998).

[0268] Binding assays as outlined above may be used to analyze supermotif and/or motif-bearing epitopes as, for example, described in Example 2.

### Example 2

### Identification of Conserved HLA Supermotif- and Motif-Bearing CTL Candidate Epitopes

[0269] Vaccine compositions of the invention may include multiple epitopes that comprise multiple HLA supermotifs or motifs to achieve broad population coverage. This example illustrates the identification of supermotif- and motif-bearing epitopes for the inclusion in such a vaccine composition. Calculation of population coverage was performed using the strategy described below.

Computer Searches and Algorithms for Identification of Supermotif and/or Motif-Bearing Epitopes

[0270] Computer searches for epitopes bearing HLA Class I or Class II supermotifs or motifs were performed as follows. All translated HCV isolate sequences were analyzed using a text string search software program, e.g., MotifSearch 1.4 (D. Brown, San Diego) to identify potential peptide sequences containing appropriate HLA binding motifs; alternative programs are readily produced in accordance with information in the art in view of the motif/supermotif disclosure herein. Furthermore, such calculations can be made mentally. Identified A2-, A3-, and DR-supermotif sequences were scored using polynomial algorithms to predict their capacity to bind to specific HLA-Class I or Class II molecules. These polynomial algorithms take into account both extended and refined motifs (that is, to account for the impact of different amino acids at different positions), and are essentially based on the premise that the overall affinity (or AG) of peptide-HLA molecule interactions can be approximated as a linear polynomial function of the type:

“ΔG”=a₁ᵢ×a₂ᵢ×a₃ᵢ . . . ×aₙᵢ

where aⱼᵢ is a coefficient which represents the effect of the presence of a given amino acid (j) at a given position (i) along the sequence of a peptide of n amino acids. The crucial assumption of this method is that the effects at each position are essentially independent of each other (i.e., independent binding of individual side-chains). When residue j occurs at position i in the peptide, it is assumed to contribute a constant amount jᵢ to the free energy of binding of the peptide irrespective of the sequence of the rest of the peptide. This assumption is justified by studies from our laboratories that demonstrated that peptides are bound to MHC and recognized by T cells in essentially an extended conformation (data omitted herein).

[0271] The method of derivation of specific algorithm coefficients has been described in Gulukota et al., J. Mol. Biol. 267:1258-126, 1997; (see also Sidney et al., Human Immunol. 45:79-93, 1996; and Southwood et al., J. Immunol. 160:3363-3373, 1998). Briefly, for all i positions, anchor and non-anchor alike, the geometric mean of the average relative binding (ARB) of all peptides carrying j is calculated relative to the remainder of the group, and used as the estimate of jᵢ. For Class II peptides, if multiple alignments are possible, only the highest scoring alignment is utilized, following an iterative procedure. To calculate an algorithm score of a given peptide in a test set, the ARB values corresponding to the sequence of the peptide are multiplied. If this product exceeds a chosen threshold, the peptide is predicted to bind. Appropriate thresholds are chosen as a function of the degree of stringency of prediction desired.

### Selection of HLA-A2 Supertype Cross-Reactive Peptides

[0272] Complete polyprotein sequences from fourteen HCV isolates were aligned, then scanned, utilizing motif identification software, to identify conserved 9- and 10-mer sequences containing the HLA-A2-supermotif main anchor specificity.

[0273] A total of 231 conserved, HLA-A2 supermotif-positive sequences were identified. These peptides were then evaluated for the presence of A*0201 preferred secondary anchor residues using A*0201-specific polynomial algorithms. A total of 67 conserved, motif-bearing and algorithm-positive sequences were identified.

[0274] Fifty of these conserved, motif-containing 9- and 10-mer peptides were tested for their capacity to bind to purified HLA-A*0201 molecules in vitro (HLA-A*0201 is considered a prototype A2 supertype molecule). Sixteen peptides bound A*0201 with IC₅₀ values ≦500 nM; 4 with high binding affinities (IC₅₀ values ≦50 nM) and 12 with intermediate binding affinities, in the 50-500 nM range (Table XXVI).

[0275] These 16 peptides were subsequently tested for the capacity to bind to additional A2-supertype molecules (A*0202, A*0203, A*0206, and A*6802). As shown in Table XXVI, most of these peptides were found to be A2-supertype cross-reactive binders. More specifically, 12/16 (75%) peptides bound at least three of the five A2-supertype molecules tested.

### Selection of HLA-A3 Supermotif-Bearing Epitopes

[0276] The sequences from the same fourteen known HCV isolates scanned above were also examined for the presence of conserved peptides with the HLA-A3-supermotif primary anchors. A total of 71 conserved 9- or 10-mer motif containing sequences were identified. Further analysis using the A03 and A11 algorithms (see, e.g., Gulukota et al, J. Mol. Biol. 267:1258-1267, 1997 and Sidney et al, Human Immunol. 45:79-93, 1996) identified 39 sequences that scored high in either or both algorithms. Twenty seven of the 39 peptides were synthesized and tested for binding to HLA-A*03 and HLA-A*11, the two most prevalent A3-supertype molecules. Fifteen peptides were identified which bound A3 and/or A11 with binding affinities of ≦500 nM (Table XXVII). These peptides were then tested for binding cross-reactivity to the other common A3-supertype alleles (A*3101, A*3301, and A*6801). Seven of the 15 peptides bound at least three of the five HLA-A3-supertype molecules tested.

[0277] In the course of an independent series of experiments (Kubo et al., J. Immunol. 152:3913-3924, 1994), one peptide, HCV NS3 1262, not identified by the selection criteria utilized above because it does not have the A3-supermotif main anchor specificity, was determined to be cross-reactive in the A3-supertype, binding A*03, A*11, and A*6801. It is also shown in Table XXVII. Interestingly, this peptide represents a single residue N-terminal truncation of peptide 1073.14, which is also shown in Table XXVII.

[0278] In summary, 8 peptides that bind 3 or more A3-supertype molecules derived from conserved regions of the HCV genome were identified.

### Selection of HLA-B 7 Supermotif Bearing Epitopes

[0279] When the same fourteen HCV isolates were also analyzed for the presence of conserved 9- or 10-mer peptides with the HLA-B7-supermotif, 35 sequences were identified. The corresponding peptides were synthesized and tested for binding to HLA-B*0702, the most common B7-supertype allele (i.e., the prototype B7 supertype allele). Thirteen peptides bound B*0702 with IC₅₀ of ≦500 nM (Table XXVIIIa). These 13 peptides were then tested for binding to other common B7-supertype molecules (B*3501, B*51, B*5301, and B*5401). As shown in Table XXVIIIa, only 1 peptide (Core 169) was capable of binding to three or more of the five B7-supertype alleles tested.

[0280] To identify additional B7-supertype epitopes, further studies were undertaken. The protein sequences from the fourteen HCV isolates utilized above were again examined to identify conserved, motif-containing 8- and 111-mers. The isolates were also examined for 9- and 10-mer sequences allowing for lower conservancy (51%-78%). These analyses identified twenty-five 8-mers, sixteen 11-mers, and thirty-five 9- and 10-mers. These peptides were synthesized and tested for binding to B*0702. Thirteen peptides bound with high or intermediate affinity to B*0702 (IC₅₀≦500 nM) (Table XXVIIIb). These peptides were additionally screened for binding to other B7-supertype molecules. Only one cross-reactive binder, the NS3 1378 8-mer (peptide 29.0035/1260.04), was identified (Table XXVIIIb).

[0281] In summary, a total of two cross-reactive B7-supertype binders were identified (Core 169 and NS3 1378).

### Selection of A1 and A24 Motif-Bearing Epitopes

[0282] To further increase population coverage, HLA-A1 and -A24 epitopes can also be incorporated into potential vaccine constructs.

[0283] In a previous analysis, two A1 and three A24 binders, 100% conserved among four strains of HCV, were identified (Wentworth et al., Int. Immunol. 8:651-659, 1996). An analysis of the protein sequence data from the fourteen HCV strains utilized above demonstrated that these peptides were >79% conserved, and also identified an additional eleven A1- and twenty five A24-motif-containing conserved sequences (see Table XXIXA and B). Testing for binding to the appropriate HLA molecule (i.e., A1 or A24) was completed for eight of the additional eleven A1 peptides, and seven of the additional twenty five A24 peptides. Overall, as shown in Table XXIX, four A1-motif peptides (A) and three A24-motif peptides (B) have been found with binding capacities of 500 nM or less for the appropriate allele-specific HLA molecule.

[0284] Analysis of the HLA-A2 and A3 supermotif-bearing epitopes identified above revealed that in 13/14 cases, peptides binding the supertype prototype HLA molecule (i.e. A*0201 for the A2 supertype, and A*0301 for the A3 supertype) with an IC₅₀ of less than 100 nM were cross-reactive and recognized by HCV-infected patients as described in Example 3, which follows. Based on these observations, two A1 peptides and one A24 peptide epitopes were also selected as candidates for inclusion in vaccine compositions; these peptides bind the appropriate HLA molecule with an IC₅₀ of less than 100 nM.

### Example 3

### Confirmation of Immunogenicity

### Evaluation of A*0201 Immunogenicity

[0285] It has been shown that CTL induced in A*0201/K^{b} transgenic mice exhibit specificity similar to CTL induced in the human system (see, e.g., Vitiello et al., J. Exp. Med. 173:1007-1015, 1991; Wentworth et al., Eur. J. Immunol. 26:97-101, 1996). Accordingly, these mice were used to evaluate the immunogenicity of the twelve conserved A2-supertype cross-reactive peptides identified in Example 2 above.

[0286] CTL induction in transgenic mice following peptide immunization has been described (Vitiello et al., J. Exp. Med. 173:1007-1015, 1991; Alexander et al.; J. Immunol. 159:4753-4761, 1997). In these studies, mice were injected subcutaneously at the base of the tail with each peptide (50 μg/mouse) emulsified in IFA in the presence of an excess of an IA^{b}-restricted helper peptide (140 μg/mouse) (HBV core 128-140, Sette et al., J. Immunol. 153:5586-5592, 1994). Eleven days after injection, splenocytes were incubated in the presence of peptide-loaded syngenic LPS blasts. After six days, cultures were assayed for cytotoxic activity using peptide-pulsed targets. The data, summarized in Table XXX, indicate that 7 of the 12 peptides (58%) were capable of inducing primary CTL responses in A*0201/K^{b} transgenic mice. (For these studies, a peptide was considered positive if it induced CTL (L.U. 30/10⁶ cells ≧2 in at least two transgenic animals (Wentworth et al., Eur. J. Immunol. 26:97-101, 1996).

[0287] The conserved, cross reactive candidate CTL epitopes were also tested for recognition in vitro by PBMCs obtained from HCV-infected patients. Briefly, PBMC from patients infected with HCV were cultured in the presence of 10 μg/ml of synthetic peptide. After 7 and 14 days, the cultures were restimulated with peptide. The cultures were assayed for cytolytic activity on day 21 using target cells pulsed with the specific peptide in a standard four hour ⁵¹Cr release assay. The data are summarized in Table XXX. As shown, all 12 peptides are CTL epitopes recognized by PBMC from HCV-infected patients. From the data in Table XXX, it is interesting to note that HLA transgenics did not fully reveal the immimogenicity of some peptides that were positive in recall responses. This apparent discrepancy may reflect differences in the route of immunization utilized (e.g., natural infection versus peptide immunization), or CTL repertoire.

### Evaluation of A*03/A11 Immunogenicity

[0288] The immunogenicity of six of the eight A3-supertype cross-reactive peptides identified in Example 2 above was evaluated in HLA-A11/K^{b} transgenic mice, using the protocol described above for HLA-A2 transgenic mice (Alexander et al., J. Immunol. 159:4753-4761, 1997). Five of these six peptides were able to induce primary CTL responses (Table XXXI).

[0289] All eight peptides were also studied by collaborators using PBMC cultures from HCV infected patients and contacts of such patients. This data is also summarized in Table XXXI. Briefly, all eight peptides were recognized by HCV infected individuals.

### Evaluation of B7 Immunogenicity

[0290] One of the two B7-supertype cross-reactive peptides (1145.12, Core 169) has been evaluated for immunogenicity in HCV-infected patients. Two independent collaborators have shown that this peptide is indeed immunogenic, and is recognized by T cells from HCV-infected patients (Chang et al., J. Immunol. 162:1156-1164, 1999)

### Example 4

### Implementation of the Extended Supermotif to Improve the Binding Capacity of Native Epitopes by Creating Analogs

[0291] HLA motifs and supermotifs (comprising primary and/or secondary residues) are useful in the identification and preparation of highly cross-reactive native peptides, as demonstrated herein. Moreover, the definition of HLA motifs and supermotifs also allows one to engineer highly cross-reactive epitopes by identifying residues within a native peptide sequence which can be analogued, or “fixed” to confer upon the peptide certain characteristics, e.g. greater cross-reactivity within the group of HLA molecules that comprise a supertype, and/or greater binding affinity for some or all of those HLA molecules. Examples of analog peptides that exhibit modulated binding affinity are set forth in this example.

### Analoging at Primary Anchor Residues

[0292] As shown in Example 2, more than ten different HCV-derived, A2-supertype-restricted epitopes were identified. Peptide engineering strategies are implemented to further increase the cross-reactivity of the candidate epitopes identified above which bind 3/5 of the A2 supertype alleles tested. On the basis of the data disclosed, e.g., in related and co-pending U.S. Ser. No. 09/226,775, the main anchors of A2-supermotif-bearing peptides are altered, for example, to introduce a preferred L, I, V, or M at position 2, and I or V at the C-terminus.

[0293] To analyze the cross-reactivity of the analog peptides, each engineered analog is initially tested for binding to the prototype A2 supertype allele A*0201, then, if A*0201 binding capacity is maintained, for A2-supertype cross-reactivity.

[0294] Similarly, analogs of HLA-A3 supermotif-bearing epitopes may also be generated. For example, peptides binding to 3/5 of the A3-supertype molecules may be engineered at primary anchor residues to possess a preferred residue (V, S, M, or A) at position 2.

[0295] The analog peptides are then tested for the ability to bind A*03 and A*11 (prototype A3 supertype alleles). Those peptides that demonstrate ≦500 nM binding capacity are then tested for A3-supertype cross-reactivity.

[0296] Similarly to the A2- and A3-motif bearing peptides, peptides binding 3 or more B7-supertype alleles may be improved, where possible, to achieve increased cross-reactive binding. B7 supermotif-bearing peptides may, for example, be engineered to possess a preferred residue (V, I, L, or F) at the C-terminal primary anchor position, as demonstrated by Sidney et al. (J. Immunol. 157:3480-3490, 1996).

### Analoging at Secondary Anchor Residues

[0297] Moreover, HLA supermotifs are of value in engineering highly cross-reactive peptides and/or peptides that bind HLA molecules with increased affinity by identifying particular residues at secondary anchor positions that are associated with such properties. Demonstrating this, the binding capacity of a peptide representing a discreet single amino acid substitution at position one was analyzed. Peptide 1145.13 (Table XXVIIIc), which represents the substitution of L to F at position 1 of the core 169 sequence, binds all five B7-supertype molecules with a good affinity (all IC₅₀ values ≦132 nM), and in 3 instances has higher affinity over that of the parent peptide by >35-fold.

[0298] Because so few B7-supertype cross-reactive epitopes were identified, our results from previous binding evaluations were analyzed to identify conserved (8-, 9-, 10-, or 11-mer) peptides which bind, minimally, 3/5 B7 supertype molecules with weak affinity (IC₅₀ of 500 nM-5 μM). This analysis identified 9 peptides, 6 of which are analogued (including core 169 which had been previously analogued). These peptides are tested for enhanced binding affinity and B7-supertype cross-reactivity.

[0299] Engineered analogs with sufficiently improved binding capacity or cross-reactivity are tested for immunogenicity in HLA-B7-transgenic mice, following for example, IFA immunization or lipopeptide immunization.

[0300] In conclusion, these data demonstrate that by the use of even single amino acid substitutions, it is possible to increase the binding affinity and/or cross-reactivity of peptide ligands for HLA supertype molecules.

### Example 5

### Identification of Conserved HCV-Derived Sequences with HLA-DR Binding Motifs

[0301] Peptide epitopes bearing an HLA class II supermotif or motif may also be identified as outlined below using methodology similar to that described in Examples 1-3.

### Selection of HLA-DR-Supermotif-Bearing Epitopes

[0302] To identify HCV-derived, HLA class II HTL epitopes, the same fourteen HCV polyprotein sequences used for the identification of HLA Class I supermotif/motif sequences were analyzed for the presence of sequences bearing an HLA-DR-motif or supermotif. Specifically, 15-mer sequences were selected comprising a DR-supermotif, further comprising a 9-mer core, and three-residue N- and C-terminal flanking regions (15 amino acids total). It was also required that the 15-mer sequence be conserved in at least 79% (11/14) of the HCV strains analyzed. These criteria identified a total of 49 non-redundant sequences, which are shown in Table XXXIIA. (In the context of Class II epitopes, a sequence is considered operationally redundant if more than 80% of it's sequence overlaps with another peptide.)

[0303] Protocols for predicting peptide binding to DR molecules have been developed (Southwood et al., J. Immunol. 160:3363-3373, 1998). These protocols, specific for individual DR molecules, allow the scoring, and ranking, of 9-mer core regions. Each protocol not only scores peptide sequences for the presence of DR-supermotif primary anchors (i.e., at position 1 and position 6) within a 9-mer core, but additionally evaluates sequences for the presence of secondary anchors. Using allele specific selection tables (see, e.g., Southwood et al., ibid.), it has been found that these protocols efficiently select peptide sequences with a high probability of binding a particular DR molecule. Additionally, it has been found that performing these protocols in tandem, specifically those for DR1, DR4w4, and DR7, can efficiently select DR cross-reactive peptides.

[0304] To see if these protocols serve to identify additional epitopes, the same HCV polyproteins used above were re-scanned for the presence of 15-mer peptides with 9-mer core regions that were >79% (11/14 strains) conserved. This identified 152 sequences; 49 of which were identified previously, as described above. Next, the 9-mer core region of each of these peptides was scored using the DR1, DR4w4, and DR7 algorithms. Twenty-two peptides, including 12 new sequences (10 peptides were from the original set of 49) were found to have 9-mer cores with protocol-derived scores predictive of cross-reactive DR binders. The 12 additional sequences are shown in Table XXXIIB.

[0305] The conserved, HCV-derived peptides identified above were tested for their binding capacity for various common HLA-DR molecules. All peptides were initially tested for binding to the DR molecules in the primary panel: DR1, DR4w4, and DR7. Peptides binding at least 2 of these 3 DR molecules were then tested for binding to DR2w2 β1, DR2w2 β2, DR6w19, and DR9 molecules in secondary assays. Finally, peptides binding at least 2 of the 4 secondary panel DR molecules, and thus cumulatively at least 4 of 7 different DR molecules, were screened for binding to DR4w15, DR5w11, and DR8w2 molecules in tertiary assays. Peptides binding at least 7 of the 10 DR molecules comprising the primary, secondary, and tertiary screening assays were considered cross-reactive DR binders. The composition of these screening panels, and the phenotypic frequency of associated antigens, are shown in Table XXXIII.

[0306] Upon testing, it was found that 29 of the original 75 peptides (39%) bound two or more of the primary HLA molecules. Twenty-six of these cross-reactive binders were then tested in the secondary assays, and nineteen were found to bind at least four of the seven HLA DR molecules in the primary and secondary panels. Finally, the nineteen peptides passing the secondary screening phase were tested for binding in the tertiary assays. As a result, nine peptides were identified which bound at least seven of ten common HLA-DR molecules. Table XXXIV shows these nine peptides and their binding capacity for each allele-specific HLA-DR molecule in the primary through tertiary panels. Also shown in Table XXXIV are two peptides (F134.05 and F134.08) for which a complete binding analysis was not performed. However, both of these peptides bound six of the seven HLA DR molecules tested. F134.08 nests peptide 1283.44, which bound eight of 10 allele-specific HLA molecules.

[0307] In conclusion, eleven cross-reactive DR-binding peptides, derived from six discrete (i.e. non-redundant) regions of the HCV genome, have been identified. Two of the six regions from which these epitopes were derived are covered by multiple, overlapping epitopes.

### Selection of Conserved DR3 Motif Peptides

[0308] Because HLA-DR3 is an allele that is prevalent in Caucasian, Black, and Hispanic populations, DR3 binding capacity is an important criterion in the selection of HTL epitopes. However, data generated previously indicated that DR3 only rarely cross-reacts with other DR alleles (Sidney et al., J. Immunol. 149:2634-2640, 1992; Geluk et al., J. Immunol. 152:5742-5748, 1994; Southwood et al., J. Immunol. 160:3363-3373, 1998). This is not entirely surprising in that the DR3 peptide-binding motif appears to be distinct from the specificity of most other DR alleles.

[0309] To efficiently identify peptides that bind DR3, target proteins were analyzed for conserved sequences carrying one of the two DR3 specific binding motifs reported by Geluk et al. (J. Immunol. 152:5742-5748, 1994). Fifteen sequences, including a peptide nested within a DR-supermotif sequence identified above (peptide Pape 22), were identified (Table XXXIId). Preferably, DR3 motifs will be found clustered in proximity with DR supermotif regions.

[0310] Fourteen of the fifteen peptides containing a DR3 motif were tested for their DR3 binding capacity. Two peptides (CH35.0106 and CH35.0107) were found to bind DR3 with an affinity of 1 μM or less (Table XXXV), and thereby qualify as HLA class II high affinity binders.

[0311] DR3 binding epitopes identified in this manner may then be included in vaccine compositions with DR supermotif-bearing peptide epitopes.

### Example 6

### Immunogenicity of Candidate HCV-Derived HTL Epitopes and Known Dominant HCV HTL Epitope

[0312] In the course of collaborative studies with G. Pape and C. Ferrari, eight conserved, HCV-derived peptides have been identified which are recognized by HCV-infected individuals.

[0313] One of these studies (Diepolder et al., J. Virol. 71:6011-6019, 1997), identified peptide F98.05, which spans residues 1248-1261 of the NS3 protein, as an immunodominant CD4+ T-cell epitope that was recognized by 14/23 NS3-specific CD4+ T-cell clones from 4/5 patients with acute hepatitis C infection. This epitope, shown above to be an HLA-DR cross-reactive binder (see Table XXXIV), was capable of being presented to helper CD4+ T cells by multiple HLA molecules (DR4, DR11, DR12, DR13, and DR16). Two other peptides, Pape 22 and Pape 29, were also recognized by CD4+ T cell clones, although, in a more limited context; correspondingly, neither of these peptides are DR-cross-reactive binders.

[0314] By direct peripheral blood T cell stimulation and by fine specificity analysis of HCV-specific T-cell lines and clones, studies done in collaboration with Ferrari's group identified 6 immunodominant epitopes, including one also identified in the Pape collaboration, that are derived from conserved regions of the core, NS3, and NS4 proteins. These epitopes were also found to be cross-reactive, being presented to T cells in the context of different Class II molecules. Three of the 6 epitopes, F98.04 (F134.03), F1 34.05 and F1 34.08, are cross-reactive HLA-DR binders (see Table XXXIV).

[0315] In conclusion, the immunogenicity of 8 epitopes derived from conserved regions of the HCV genome has been demonstrated. Three of these epitopes (F98.05, F134.05, and F1 34.08; see Table XXXIV) are broadly cross-reactive HLA-DR binding peptides.

### Example 7

### Calculation of Phenotypic Frequencies of HLA-Supertypes in Various Ethnic Backgrounds to Determine Breadth of Population Coverage

[0316] This example illustrates the assessment of the breadth of population coverage of a vaccine composition comprised of multiple epitopes comprising multiple supermotifs and/or motifs.

[0317] In order to analyze population coverage, gene frequencies of HLA alleles were determined. Gene frequencies for each HLA allele were calculated from antigen or allele frequencies utilizing the binomial distribution formulae gf=1-(SQRT(1-af)) (see, e.g., Sidney et al., Human Immunol. 45:79-93, 1996). To obtain overall phenotypic frequencies, cumulative gene frequencies were calculated, and the cumulative antigen frequencies derived by the use of the inverse formula [af=1-(1-Cgf)²].

[0318] Where frequency data was not available at the level of DNA typing, correspondence to the serologically defined antigen frequencies was assumed. To obtain total potential supertype population coverage no linkage disequilibrium was assumed, and only alleles confirmed to belong to each of the supertypes were included (minimal estimates). Estimates of total potential coverage achieved by inter-loci combinations were made by adding to the A coverage the proportion of the non-A covered population that could be expected to be covered by the B alleles considered (e.g., total=A+B*(1-A)). Confirmed members of the A3-like supertype are A3, A11, A31, A*3301, and A*6801. Although the A3-like supertype may also include A34, A66, and A*7401, these alleles were not included in overall frequency calculations. Likewise, confirmed members of the A2-like supertype family are A*0201, A*0202, A*0203, A*0204, A*0205, A*0206, A*0207, A*6802, and A*6901. Finally, the B7-like supertype-confirmed alleles are: B7, B*3501-03, B51, B*5301, B*5401, B*5501-2, B*5601, B*6701, and B*7801 (potentially also B*1401, B*3504-06, B*4201, and B*5602).

[0319] Population coverage achieved by combining the A2-, A3- and B7-supertypes is approximately 86% in five major ethnic groups (see Table XXI). Coverage may be extended by including peptides bearing the A1 and A24 motifs. On average, A1 is present in 12% and A24 in 29% of the population across five different major ethnic groups (Caucasian, North American Black, Chinese, Japanese, and Hispanic). Together, these alleles are represented with an average frequency of 39% in these same ethnic populations. The total coverage across the major ethnicities when A1 and A24 are combined with the coverage of the A2-, A3- and B7-supertype alleles is >95%. An analagous approach can be used to estimate population coverage achieved with combinations of class II motif-bearing epitopes.

Summary of Candidate HLA class I and class II Epitopes

[0320] In summary, on the basis of the data presented in the above examples, 26 CTL candidate peptide epitopes derived from conserved regions of the HCV virus have been identified (Table XXXVIa). These include twelve HLA-A2 supermotif-bearing epitopes, eight HLA-A3 supermotif-bearing epitopes, and one HLA-B7 supermotif-bearing epitope, each capable of binding to multiple A2-, A3-, or B7-supertype molecules, and immunogenic in HLA transgenic mice or antigenic for human PBL (with the exception of peptide 29.0035/1260.04). Additional epitopes not evaluated for immunogenicity are also included. They are an additional B7-supermotif-bearing epitope and two HLA-A1 and one HLA-A24 high-affinity binding peptides. A known HLA-A31 restricted epitope (VGIYLLPNR), which also binds HLA-A33, is also set out in Table XXXVIa and is useful in combination with other Class I or Class II epitopes.

[0321] With these 26 CTL epitopes (as disclosed herein and from the art), average population coverage, (i.e., recognition of at least one HCV epitope), is predicted to be greater than 95% in each of five major ethnic populations. The potential redundancy of coverage afforded by 25 of these epitopes (the peptide 24.0086 was not included) was estimated using the game theory Monte Carlo simulation analysis, which is known in the art (see e.g., Osborne, M. J. and Rubinstein, A. “A course in game theory” MIT Press, 1994). As shown in FIG. 1, it is estimated that 90% of the individuals in a population comprised of the Caucasian, North American Black, Japanese, Chinese, and Hispanic ethnic groups would recognize 2 or more of the candidate epitopes described herein.

[0322] A list of HCV-derived HTL epitopes that would be preferred for use in the design of minigene constructs or other vaccine formulations is summarized in Table XXXVIb. As shown, 9 different peptide-binding regions have been identified which bind multiple HLA-DR molecules or bind HLA-DR3. (In the case of the NS4 1914-1935 region, the longer peptide, F134.08, recognized by patients, was chosen over the shorter peptide, 1283.44. The longer peptide essentially incorporates the shorter peptide, and also binds additional DR molecules that the shorter peptide does not bind.) Three of these peptides have been recognized as dominant epitopes in HCV infected patients.

[0323] It is estimated that each of 10 common DR molecules recognizing the DR supermotif, and DR3, are covered by a minimum of 2 epitopes. Correspondingly, the total estimated population coverage represented by this panel of epitopes is in excess of 91% in each of the 5 major ethnic populations (Table XXXVII).

### Example 8

### Recognition of Generation of Endogenous Processed Antigens After Priming

[0324] This example determines that CTL induced by native or analogued peptide epitopes identified and selected as described in Examples 1-6 recognize endogenously synthesized, i.e., native antigens.

[0325] Effector cells isolated from transgenic mice that are immunized with peptide epitopes as in Example 3, for example HLA-A2 supermotif-bearing epitopes, are re-stimulated in vitro using peptide-coated stimulator cells. Six days later, effector cells are assayed for cytotoxicity and the cell lines that contain peptide-specific cytotoxic activity are further re-stimulated. An additional six days later, these cell lines are tested for cytotoxic activity on ⁵¹Cr labeled Jurkat-A2.1/K^{b} target cells in the absence or presence of peptide, and also tested on ⁵¹Cr labeled target cells bearing the endogenously synthesized antigen, i.e. cells that are stably transfected with HCV expression vectors.

[0326] The result will demonstrate that CTL lines obtained from animals primed with peptide epitope recognize endogenously synthesized HCV antigen. The choice of transgenic mouse model to be used for such an analysis depends upon the epitope(s) that is being evaluated. In addition to HLA-A*0201/K^{b} transgenic mice, several other transgenic mouse models including mice with human A11, which may also be used to evaluate A3 epitopes, and B7 alleles have been characterized and others (e.g., transgenic mice for HLA-A1 and A24) are being developed. HLA-DR1 and HLA-DR3 mouse models have also been developed, which may be used to evaluate HTL epitopes.

### Example 9

### Activity of CTL-HTL Conjugated Epitopes in Transgenic Mice

[0327] This example illustrates the induction of CTLs and HTLs in transgenic mice by use of an HCV CTL/HTL peptide conjugate whereby the vaccine composition comprises peptides administered to an HCV-infected patient or an individual at risk for HCV. The peptide composition can comprise multiple CTL and/or HTL epitopes. This analysis demonstrates enhanced immunogenicity that can be achieved by inclusion of one or more HTL epitopes in a vaccine composition. Such a peptide composition can comprise a lipidated HTL epitope conjugated to a preferred CTL epitope containing, for example, at least one CTL epitope selected from Table XXVI-XXIX, or an analog of that epitope. The HTL epitope is, for example, selected from Table XXXII.

[0328] Lipopeptide preparation: Lipopeptides are prepared by coupling the appropriate fatty acid to the amino terminus of the resin bound peptide. A typical procedure is as follows: A dichloromethane solution of a four-fold excess of a pre-formed symmetrical anhydride of the appropriate fatty acid is added to the resin and the mixture is allowed to react for two hours. The resin is washed with dichloromethane and dried. The resin is then treated with trifluoroacetic acid in the presence of appropriate scavengers [e.g. 5% (v/v) water] for 60 minutes at 20° C. After evaporation of excess trifluoroacetic acid, the crude peptide is washed with diethyl ether, dissolved in methanol and precipitated by the addition of water. The peptide is collected by filtration and dried.

[0329] Immunization procedures: Immunization of transgenic mice is performed as described (Alexander et al., J. Immunol. 159:4753-4761, 1997). For example, A2/K^{b} mice, which are transgenic for the human HLA A2.1 allele and are useful for the assessment of the immunogenicity of HLA-A*0201 motif- or HLA-A2 supermotif-bearing epitopes, are primed subcutaneously (base of the tail) with 0.1 ml of peptide conjugate formulated in saline, or DMSO/saline. Seven days after priming, splenocytes obtained from these animals are restimulated with syngenic irradiated LPS-activated lymphoblasts coated with peptide.

[0330] Cell lines: Target cells for peptide-specific cytotoxicity assays are Jurkat cells transfected with the HLA-A2.1/K^{b} chimeric gene (e.g., Vitiello et al., J. Exp. Med. 173:1007, 1991)

[0331] In vitro CTL activation: One week after priming, spleen cells (30×10⁶ cells/flask) are co-cultured at 37° C. with syngeneic, irradiated (3000 rads), peptide coated lymphoblasts (10×10⁶ cells/flask) in 10 ml of culture medium/T25 flask. After six days, effector cells are harvested and assayed for cytotoxic activity.

[0332] Assay for cytotoxic activity: Target cells (1.0 to 1.5×10⁶) are incubated at 37° C. in the presence of 200 μl of ⁵¹Cr. After 60 minutes, cells are washed three times and resuspended in R10 medium. Peptide is added where required at a concentration of 1 μg/ml. For the assay, 10^{4 51}Cr-labeled target cells are added to different concentrations of effector cells (final volume of 200 μl) in U-bottom 96-well plates. After a 6 hour incubation period at 37° C., a 0.1 ml aliquot of supernatant is removed from each well and radioactivity is determined in a Micromedic automatic gamma counter. The percent specific lysis is determined by the formula: percent specific release=100×(experimental release−spontaneous release)/(maximum release−spontaneous release). To facilitate comparison between separate CTL assays run under the same conditions, % ⁵¹Cr release data is expressed as lytic units/10⁶ cells. One lytic unit is arbitrarily defined as the number of effector cells required to achieve 30% lysis of 10,000 target cells in a 6 hour ⁵¹Cr release assay. To obtain specific lytic units/10⁶, the lytic units/10⁶ obtained in the absence of peptide is subtracted from the lytic units/10⁶ obtained in the presence of peptide. For example, if 30% ⁵¹Cr release is obtained at the effector (E): target (T) ratio of 50:1 (i.e., 5×10⁵ effector cells for 10,000 targets) in the absence of peptide and 5:1 (i.e., 5×10⁴ effector cells for 10,000 targets) in the presence of peptide, the specific lytic units would be: [(1/50,000)−(1/500,000)]×106=18 LU.

[0333] The results are analyzed to assess the magnitude of the CTL responses of animals injected with the immunogenic CTL/HTL conjugate vaccine preparation and are compared to the magnitude of the CTL response achieved using the CTL epitope as outlined in Example 3. Analyses similar to this may be performed to evaluate the immunogenicity of peptide conjugates containing multiple CTL epitopes and/or multiple HTL epitopes. In accordance with these procedures it is found that a CTL response is induced, and concomitantly that an HTL response is induced upon administration of such compositions.

### Example 10

### Selection of CTL and HTL Epitopes for Inclusion in an HCV-Specific Vaccine

[0334] This example illustrates the procedure for the selection of peptide epitopes for vaccine compositions of the invention. The peptides in the composition may be in the form of a nucleic acid sequence, either single or one or more sequences (i.e., minigene) that encodes peptide(s), or may be single and/or polyepitopic peptides.

[0335] The following principles are utilized when selecting an array of epitopes for inclusion in a vaccine composition. Each of the following principles are balanced in order to make the selection.

[0336] 1.) Epitopes are selected which, upon administration, mimic immune responses that have been observed to be correlated with HCV clearance. For HLA Class I this includes 3-4 epitopes that come from at least one antigen of HCV. In other words, it has been observed that patients who spontaneously clear HCV generate an immune response to at least 3 epitopes on at least one HCV antigen. For HLA Class II a similar rationale is employed; again 3-4 epitopes are selected from at least one HCV antigen.

[0337] 2.) Epitopes are selected that have the requisite binding affinity established to be correlated with immunogenicity: for HLA Class I an IC₅₀ of 500 nM or less, or for Class II an IC₅₀ of 1000 nM or less.

[0338] 3.) Sufficient supermotif bearing peptides, or a sufficient array of allele-specific motif bearing peptides, are selected to give broad population coverage. For example, epitopes are selected to provide at least 80% population coverage. A Monte Carlo analysis, a statistical evaluation known in the art and discussed herein, can be employed to assess breadth, or redundancy, of population coverage.

[0339] 4.) When selecting epitopes for HCV antigens it may be preferable to select native epitopes. Therefore, of particular relevance for infectious disease vaccines, are epitopes referred to as “nested epitopes.” Nested epitopes occur where at least two epitopes overlap in a given peptide sequence. A peptide comprising “transcendent nested epitopes” is a peptide that has both HLA class I and HLA class II epitopes in it.

[0340] When providing nested epitopes, a sequence that has the greatest number of epitopes per provided sequence is provided. A limitation on this principle is to avoid providing a peptide that is any longer than the amino terminus of the amino terminal epitope and the carboxyl terminus of the carboxyl terminal epitope in the peptide. When providing a longer peptide sequence, such as a sequence comprising nested epitopes, the sequence is screened in order to insure that it does not have pathological or other deleterious biological properties.

[0341] 5.) When creating a minigene, as disclosed in greater detail in Example 11, an objective is to generate the smallest peptide possible that encompasses the epitopes of interest. The principles employed are similar, if not the same as those employed when selecting a peptide comprising nested epitopes. Additionally, however, upon determination of the nucleic acid sequence to be provided as a minigene, the peptide encoded thereby is analyzed to determine whether any “junctional epitopes” have been created. A junctional epitope is an actual binding epitope, as predicted, e.g., by motif analysis. Junctional epitopes are generally to be avoided because the recipient may generate an immune response to that epitope, which is not present in a native HCV protein sequence. Of particular concern is a junctional epitope that is a “dominant epitope.” A dominant epitope may lead to such a zealous response that immune responses to other epitopes are diminished or suppressed.

[0342] Peptide epitopes for inclusion in vaccine compositions are, for example, selected from those listed in Tables XXVI-XXIX and Table XXXII. A vaccine composition comprised of selected peptides, when administered, is safe, efficacious, and elicits an immune response similar in magnitude of an immune response that clears an acute HCV infection.

### Example 11

### Construction of Minigene Multi-Epitope DNA Plasmids

[0343] This example provides general guidance for the construction of a minigene expression plasmid. Minigene plasmids may, of course, contain various configurations of CTL and/or HTL epitopes or epitope analogs as described herein. Expression plasmids have been constructed and evaluated as described, for example, in co-pending U.S. Ser. No. 09/311,784 filed May 13, 1999. An example of such a plasmid for the expression of HCV epitopes is shown in FIG. 2, which illustrates the orientation of HCV peptide epitopes in a minigene construct.

[0344] A minigene expression plasmid may include multiple CTL and HTL peptide epitopes. In the present example, HLA-A2, -A3, -B7 supermotif-bearing peptide epitopes and HLA-A1 and -A24 motif-bearing peptide epitopes are used in conjunction with DR supermotif-bearing epitopes and/or DR3 epitopes (FIG. 2). Preferred epitopes are identified, for example, in Tables XXVI-XXIX and XXXII. HLA class I supermotif or motif-bearing peptide epitopes derived from multiple HCV antigens, e.g., the core, NS4, NS3, NS5, NS1/E2, are selected such that multiple supermotifs/motifs are represented to ensure broad population coverage. Similarly, HLA class II epitopes are selected from multiple HCV antigens to provide broad population coverage, i.e. both HLA DR-1-4-7 supermotif-bearing epitopes and HLA DR-3 motif-bearing epitopes are selected for inclusion in the minigene construct. The selected CTL and HTL epitopes are then incorporated into a minigene for expression in an expression vector.

[0345] This example illustrates the methods to be used for construction of such a minigene-bearing expression plasmid. Other expression vectors that may be used for minigene compositions are available and known to those of skill in the art.

[0346] The minigene DNA plasmid contains a consensus Kozak sequence and a consensus murine kappa Ig-light chain signal sequence followed by CTL and/or HTL epitopes selected in accordance with principles disclosed herein. The sequence encodes an open reading frame fused to the Myc and H is antibody epitope tag coded for by the pcDNA 3.1 Myc-His vector.

[0347] Overlapping oligonucleotides, for example eight oligonucleotides, averaging approximately 70 nucleotides in length with 15 nucleotide overlaps, are synthesized and HPLC-purified. The oligonucleotides encode the selected peptide epitopes as well as appropriate linker nucleotides, Kozak sequence, and signal sequence. The final multiepitope minigene is assembled by extending the overlapping oligonucleotides in three sets of reactions using PCR. A Perkin/Elmer 9600 PCR machine is used and a total of 30 cycles are performed using the following conditions: 95° C. for 15 sec, annealing temperature (5° below the lowest calculated Tm of each primer pair) for 30 sec, and 72° C. for 1 min.

[0348] For the first PCR reaction, 5 μg of each of two oligonucleotides are annealed and extended: Oligonucleotides 1+2, 3+4, 5+6, and 7+8 are combined in 100 μl reactions containing Pfu polymerase buffer (1×=10 mM KCL, 10 mM (NH₄)₂SO₄, 20 mM Tris-chloride, pH 8.75, 2 mM MgSO₄, 0.1% Triton X-100, 100 μg/ml BSA), 0.25 mM each dNTP, and 2.5 U of Pfu polymerase. The full-length dimer products are gel-purified, and two reactions containing the product of 1+2 and 3+4, and the product of 5+6 and 7+8 are mixed, annealed, and extended for 10 cycles. Half of the two reactions are then mixed, and 5 cycles of annealing and extension carried out before flanking primers are added to amplify the full length product for 25 additional cycles. The full-length product is gel-purified and cloned into pCR-blunt (Invitrogen) and individual clones are screened by sequencing.

### Example 12

### The Plasmid Construct and the Degree to which it Induces Immunogenicity

[0349] The degree to which the plasmid construct prepared using the methodology outlined in Example 11 is able to induce immunogenicity is evaluated through in vivo injections into mice and subsequent in vitro assessment of CTL and HTL activity, which are analysed using cytotoxicity and proliferation assays, respectively, as detailed e.g., in U.S. Ser. No. 09/311,784 filed May 13, 1999 and Alexander et al., Immunity 1:751-761, 1994. To assess the capacity of the pMin minigene construct to induce CTLs in vivo, HLA-A11/K^{b} transgenic mice, for example, are immunized intramuscularly with 100 μg of naked cDNA. As a means of comparing the level of CTLs induced by cDNA immunization, a control group of animals is also immunized with an actual peptide composition that comprises multiple epitopes synthesized as a single polypeptide as they would be encoded by the minigene.

[0350] Splenocytes from immunized animals are stimulated twice with each of the respective compositions (peptide epitopes encoded in the minigene or the polyepitopic peptide), then assayed for peptide-specific cytotoxic activity in a ⁵¹Cr release assay. The results indicate the magnitude of the CTL response directed against the A3-restricted epitope, thus indicating the in vivo immunogenicity of the minigene vaccine and polyepitopic vaccine. It is, therefore, found that the minigene elicits immune responses directed toward the HLA-A3 supermotif peptide epitopes as does the polyepitopic peptide vaccine. A similar analysis is also performed using other HLA-A2 and HLA-B7 transgenic mouse models to assess CTL induction by HLA-A2 and HLA-B7 motif or supermotif epitopes.

[0351] To assess the capacity of a class II epitope encoding minigene to induce HTLs in vivo, I-A^{b} restricted mice, for example, are immunized intramuscularly with 100 μg of plasmid DNA. As a means of comparing the level of HTLs induced by DNA immunization, a group of control animals is also immunized with an actual peptide composition emulsified in complete Freund's adjuvant.

[0352] CD4+ T cells, i.e. HTLs, are purified from splenocytes of immunized animals and stimulated with each of the respective compositions (peptides encoded in the minigene). The HTL response is measured using a ³H-thymidine incorporation proliferation assay, (see, e.g., Alexander et al. Immunity 1:751-761, 1994). the results indicate the magnitude of the HTL response, thus demonstrating the in vivo immunogenicity of the minigene.

### Example 13

### Peptide Composition for Prophylactic Uses

[0353] Vaccine compositions of the present invention are used to prevent HCV infection in persons who are at risk for such infection. For example, a polyepitopic peptide epitope composition (or a nucleic acid comprising the same) containing multiple CTL and HTL epitopes such as those selected in Examples 9 and/or 10, which are also selected to target greater than 80% of the population, is administered to individuals at risk for HCV infection. The composition is provided as a single lipidated polypeptide that encompasses multiple epitopes. The vaccine is administered in an aqueous carrier comprised of Freunds Incomplete Adjuvant. The dose of peptide for the initial immunization is from about 1 to about 50,000 μg, generally 100-5,000 μg, for a 70 kg patient. The initial administration of vaccine is followed by booster dosages at 4 weeks followed by evaluation of the magnitude of the immune response in the patient, by techniques that determine the presence of epitope-specific CTL populations in a PBMC sample. Additional booster doses are administered as required. The composition is found to be both safe and efficacious as a prophylaxis against HCV infection.

[0354] Alternatively, the polyepitopic peptide composition can be administered as a nucleic acid in accordance with methodologies known in the art and disclosed herein.

### Example 14

### Polyepitopic Vaccine Compositions Derived from Native HCV Sequences

[0355] A native HCV polyprotein sequence is screened, preferably using computer algorithms defined for each class I and/or class II supermotif or motif, to identify “relatively short” regions of the polyprotein that comprise multiple epitopes and is preferably less in length than an entire native antigen. This relatively short sequence that contains multiple distinct, even overlapping, epitopes is selected and used to generate a minigene construct. The construct is engineered to express the peptide, which corresponds to the native protein sequence. The “relatively short” peptide is generally less than 250 amino acids in length, often less than 100 amino acids in length, preferably less than 75 amino acids in length, and more preferably less than 50 amino acids in length. The protein sequence of the vaccine composition is selected because it has maximal number of epitopes contained within the sequence, i.e., it has a high concentration of epitopes. As noted herein, epitope motifs may be nested or overlapping (i.e., frame shifted relative to one another). For example, with frame shifted overlapping epitopes, two 9-mer epitopes and one 10-mer epitope can be present in a 10 amino acid peptide. Such a vaccine composition is administered for therapeutic or prophylactic purposes.

[0356] The vaccine composition will preferably include, for example, three CTL epitopes and at least one HTL epitope from HCV. This polyepitopic native sequence is administered either as a peptide or as a nucleic acid sequence which encodes the peptide. Alternatively, an analog can be made of this native sequence, whereby one or more of the epitopes comprise substitutions that alter the cross-reactivity and/or binding affinity properties of the polyepitopic peptide.

[0357] The embodiment of this example provides for the possibility that an as yet undiscovered aspect of immune system processing will apply to the native nested sequence and thereby facilitate the production of therapeutic or prophylactic immune response-inducing vaccine compositions. Additionally such an embodiment provides for the possibility of motif-bearing epitopes for an HLA makeup that is presently unknown. Furthermore, this embodiment (absent analogs) directs the immune response to multiple peptide sequences that are actually present in native HCV antigens thus avoiding the need to evaluate any junctional epitopes. Lastly, the embodiment provides an economy of scale when producing nucleic acid vaccine compositions.

[0358] Related to this embodiment, computer programs can be derived in accordance with principles in the art, which identify in a target sequence, the greatest number of epitopes per sequence length.

### Example 15

### Polyepitopic Vaccine Compositions Directed to Multiple Diseases

[0359] The HCV peptide epitopes of the present invention are used in conjunction with peptide epitopes from target antigens related to one or more other diseases, to create a vaccine composition that is useful for the prevention or treatment of HCV as well as the one or more other disease(s). Examples of the other diseases include, but are not limited to, HIV, HBV, and HPV.

[0360] For example, a polyepitopic peptide composition comprising multiple CTL and HTL epitopes that target greater than 98% of the population may be created for administration to individuals at risk for both HCV and HIV infection. The composition can be provided as a single polypeptide that incorporates the multiple epitopes from the various disease-associated sources, or can be administered as a composition comprising one or more discrete epitopes.

### Example 16

### Use of Peptides to Evaluate an Immune Response

[0361] Peptides of the invention may be used to analyze an immune response for the presence of specific CTL or HTL populations directed to HCV. Such an analysis may be performed in a manner as that described by Ogg et al., Science 279:2103-2106, 1998. In the following example, peptides in accordance with the invention are used as a reagent for diagnostic or prognostic purposes, not as an immunogen.

[0362] In this example highly sensitive human leukocyte antigen tetrameric complexes (“tetramers”) are used for a cross-sectional analysis of, for example, HCV HLA-A*0201-specific CTL frequencies from HLA A*0201-positive individuals at different stages of infection or following immunization using an HCV peptide containing an A*0201 motif. Tetrameric complexes are synthesized as described (Musey et al., N. Engl. J. Med. 337:1267, 1997). Briefly, purified HLA heavy chain (A*0201 in this example) and β2-microglobulin are synthesized by means of a prokaryotic expression system. The heavy chain is modified by deletion of the transmembrane-cytosolic tail and COOH-terminal addition of a sequence containing a BirA enzymatic biotinylation site. The heavy chain, β2-microglobulin, and peptide are refolded by dilution. The 45-kD refolded product is isolated by fast protein liquid chromatography and then biotinylated by BirA in the presence of biotin (Sigma, St. Louis, Mo.), adenosine 5′triphosphate and magnesium. Streptavidin-phycoerythrin conjugate is added in a 1:4 molar ratio, and the tetrameric product is concentrated to 1 mg/ml. The resulting product is referred to as tetramer-phycoerythrin.

[0363] For the analysis of patient blood samples, approximately one million PBMCs are centrifuged at 300 g for 5 minutes and resuspended in 50 μl of cold phosphate-buffered saline. Tri-color analysis is performed with the tetramer-phycoerythrin, along with anti-CD8-Tricolor, and anti-CD38. The PBMCs are incubated with tetramer and antibodies on ice for 30 to 60 min and then washed twice before formaldehyde fixation. Gates are applied to contain >99.98% of control samples. Controls for the tetramers include both A*0201-negative individuals and A*0201-positive uninfected donors. The percentage of cells stained with the tetramer is then determined by flow cytometry. The results indicate the number of cells in the PBMC sample that contain epitope-restricted CTLs, thereby readily indicating the extent of immune response to the HCV epitope, and thus the stage of infection with HCV, the status of exposure to HCV, or exposure to a vaccine that elicits a protective or therapeutic response.

### Example 17

### Use of Peptide Epitopes to Evaluate Recall Responses

[0364] The peptide epitopes of the invention are used as reagents to evaluate T cell responses, such as acute or recall responses, in patients. Such an analysis may be performed on patients who have recovered from infection, who are chronically infected with HCV, or who have been vaccinated with an HCV vaccine.

[0365] For example, the class I restricted CTL response of persons who have been vaccinated may be analyzed. The vaccine may be any HCV vaccine. PBMC are collected from vaccinated individuals and HLA typed. Appropriate peptide epitopes of the invention that are preferably highly conserved and, optimally, bear supermotifs to provide cross-reactivity with multiple HLA supertype family members, are then used for analysis of samples derived from individuals who bear that HLA type.

[0366] PBMC from vaccinated individuals are separated on Ficoll-Histopaque density gradients (Sigma Chemical Co., St. Louis, Mo.), washed three times in HBSS (GIBCO Laboratories), resuspended in RPMI-1640 (GIBCO Laboratories) supplemented with L-glutamine (2 mM), penicillin (50 U/ml), streptomycin (50 μg/ml), and Hepes (10 mM) containing 10% heat-inactivated human AB serum (complete RPMI) and plated using microculture formats. A synthetic peptide comprising an epitope of the invention is added at 10 μg/ml to each well and HBV core 128-140 epitope is added at 1 μg/ml to each well as a source of T cell help during the first week of stimulation.

[0367] In the microculture format, 4×10⁵ PBMC are stimulated with peptide in 8 replicate cultures in 96-well round bottom plate in 100 μl/well of complete RPMI. On days 3 and 10, 100 ml of complete RPMI and 20 U/ml final concentration of rIL-2 are added to each well. On day 7 the cultures are transferred into a 96-well flat-bottom plate and restimulated with peptide, rIL-2 and 10⁵ irradiated (3,000 rad) autologous feeder cells. The cultures are tested for cytotoxic activity on day 14. A positive CTL response requires two or more of the eight replicate cultures to display greater than 10% specific ⁵¹Cr release, based on comparison with uninfected control subjects as previously described (Rehermann, et al., Nature Med. 2:1104,1108, 1996; Rehermann et al., J. Clin. Invest. 97:1655-1665, 1996; and Rehermann et al. J. Clin. Invest. 98:1432-1440, 1996).

[0368] Target cell lines are autologous and allogeneic EBV-transformed B-LCL that are either purchased from the American Society for Histocompatibility and Immunogenetics (ASHI, Boston, Mass.) or established from the pool of patients as described (Guilhot, et al. J. Virol. 66:2670-2678, 1992).

[0369] Cytotoxicity assays are performed in the following manner. Target cells consist of either allogeneic HLA-matched or autologous EBV-transformed B lymphoblastoid cell line that are incubated overnight with the synthetic peptide epitope of the invention at 10 μM, and labeled with 100 μCi of ⁵¹Cr (Amersham Corp., Arlington Heights, Ill.) for 1 hour after which they are washed four times with HBSS.

[0370] Cytolytic activity is determined in a standard 4-h, split well ⁵¹Cr release assay using U-bottomed 96 well plates containing 3,000 targets/well. Stimulated PBMC are tested at effector/target (E/T) ratios of 20-50:1 on day 14. Percent cytotoxicity is determined from the formula: 100×[(experimental release-spontaneous release)/maximum release-spontaneous release)]. Maximum release is determined by lysis of targets by detergent (2% Triton X-100; Sigma Chemical Co., St. Louis, Mo.). Spontaneous release is <25% of maximum release for all experiments.

[0371] The results of such an analysis indicate the extent to which HLA-restricted CTL populations have been stimulated by previous exposure to HCV or an HCV vaccine.

[0372] The class II restricted HTL responses may also be analyzed. Purified PBMC are cultured in a 96-well flat bottom plate at a density of 1.5×10⁵ cells/well and are stimulated with 10 μg/ml synthetic peptide, whole antigen, or PHA. Cells are routinely plated in replicates of 4-6 wells for each condition. After seven days of culture, the medium is removed and replaced with fresh medium containing 10 U/ml IL-2. Two days later, 1 μCi ³H-thymidine is added to each well and incubation is continued for an additional 18 hours. Cellular DNA is then harvested on glass fiber mats and analyzed for ³H-thymidine incorporation. Antigen-specific T cell proliferation is calculated as the ratio of ³H-thymidine incorporation in the presence of antigen divided by the ³H-thymidine incorporation in the absence of antigen.

### Example 18

### Induction of Specific CTL Response in Humans

[0373] A human clinical trial for an immunogenic composition comprising CTL and HTL epitopes of the invention is set up as an IND Phase I, dose escalation study and carried out as a randomized, double-blind, placebo-controlled trial. Such a trial is designed, for example, as follows:

[0374] A total of about 27 subjects are enrolled and divided into 3 groups:

[0375] Group I: 3 subjects are injected with placebo and 6 subjects are injected with 5 μg of peptide composition;

[0376] Group II: 3 subjects are injected with placebo and 6 subjects are injected with 50 μg peptide composition;

[0377] Group III: 3 subjects are injected with placebo and 6 subjects are injected with 500 μg of peptide composition.

[0378] After 4 weeks following the first injection, all subjects receive a booster inoculation at the same dosage.

[0379] The endpoints measured in this study relate to the safety and tolerability of the peptide composition as well as its immunogenicity. Cellular immune responses to the peptide composition are an index of the intrinsic activity of this the peptide composition, and can therefore be viewed as a measure of biological efficacy. The following summarize the clinical and laboratory data that relate to safety and efficacy endpoints.

[0380] Safety: The incidence of adverse events is monitored in the placebo and drug treatment group and assessed in terms of degree and reversibility.

[0381] Evaluation of Vaccine Efficacy: For evaluation of vaccine efficacy, subjects are bled before and after injection. Peripheral blood mononuclear cells are isolated from fresh heparinized blood by Ficoll-Hypaque density gradient centrifugation, aliquoted in freezing media and stored frozen. Samples are assayed for CTL and HTL activity.

[0382] The vaccine is found to be both safe and efficacious.

### Example 19

### Phase II Trials in Patients Infected with HCV

[0383] Phase II trials are performed to study the effect of administering the CTL-HTL peptide compositions to patients having chronic HCV infection. The main objectives of the trials are to determine an effective dose and regimen for inducing CTLs in chronically infected HCV patients, to establish the safety of inducing a CTL and HTL response in these patients, and to see to what extent activation of CTLs improves the clinical picture of chronically infected CTL patients, as manifested by a transient flare in alanine aminotransferase (ALT), normalization of ALT, and reduction in HCV DNA. Such a study is designed, for example, as follows:

[0384] The studies are performed in multiple centers. The trial design is an open-label, uncontrolled, dose escalation protocol wherein the peptide composition is administered as a single dose followed six weeks later by a single booster shot of the same dose. The dosages are 50, 500 and 5,000 micrograms per injection. Drug-associated adverse effects (severity and reversibility) are recorded.

[0385] There are three patient groupings. The first group is injected with 50 micrograms of the peptide composition and the second and third groups with 500 and 5,000 micrograms of peptide composition, respectively. The patients within each group range in age from 21-65, include both males and females, and represent diverse ethnic backgrounds. All of them are infected with HCV for over five years and are HIV, HBV and delta hepatitis virus (HDV) negative, but have positive levels of HCV antigen.

[0386] The magnitude and incidence of ALT flares and the levels of HCV DNA in the blood are monitored to assess the effects of administering the peptide compositions. The levels of HCV DNA in the blood are an indirect indication of the progress of treatment. The vaccine composition is found to be both safe and efficacious in the treatment of chronic HCV infection.

### Example 20

### Alternative Method of Identifying Motif-Bearing Peptides

[0387] Another way of identifying motif-bearing peptides is to elute them from cells bearing defined MHC molecules. For example, EBV transformed B cell lines used for tissue typing, have been extensively characterized to determine which HLA molecules they express. In certain cases these cells express only a single type of HLA molecule. These cells can then be infected with a pathogenic organism, e.g., HCV, HIV, etc. or transfected with nucleic acids that express the antigen of interest. Thereafter, peptides produced by endogenous antigen processing of peptides produced consequent to infection (or as a result of transfection) will bind to HLA molecules within the cell and be transported and displayed on the cell surface.

[0388] The peptides are then eluted from the HLA molecules by exposure to mild acid conditions and their amino acid sequence determined, e.g., by mass spectral analysis (e.g., Kubo et al., J. Immunol. 152:3913, 1994). Because, as disclosed herein, the majority of peptides that bind a particular HLA molecule are motif-bearing, this is an alternative modality for obtaining the motif-bearing peptides correlated with the particular HLA molecule expressed on the cell.

[0389] Alternatively, cell lines that do not express any endogenous HLA molecules can be transfected with an expression construct encoding a single HLA allele. These cells may then be used as described, i.e., they may be infected with a pathogenic organism or transfected with nucleic acid encoding an antigen of interest to isolate peptides corresponding to the pathogen or antigen of interest that have been presented on the cell surface. Peptides obtained from such an analysis will bear motif(s) that correspond to binding to the single HLA allele that is expressed in the cell.

[0390] As appreciated by one in the art, one can perform a similar analysis on a cell bearing more than one HLA allele and subsequently determine peptides specific for each HLA allele expressed. Moreover, one of skill would also recognize that means other than infection or transfection, such as loading with a protein antigen, can be used to provide a source of antigen to the cell.

[0391] The above examples are provided to illustrate the invention but not to limit its scope. For example, the human terminology for the Major Histocompatibility Complex, namely HLA, is used throughout this document. It is to be appreciated that these principles can be extended to other species as well. Thus, other variants of the invention will be readily apparent to one of ordinary skill in the art and are encompassed by the appended claims. All publications, patents, and patent application cited herein are hereby incorporated by reference for all purposes.

TABLE I

| | POSITION | POSITION | POSITION |
|---|---|---|---|
| | 2 (Primary | 3 (Primary | C Terminus |
| | Anchor) | Anchor) | (Primary Anchor) |
| SUPER- | | | |
| MOTIFS | | | |
| A1 | TILVMS | | FWY |
| A2 | LIVMATQ | | IVMATL |
| A3 | VSMATLI | | RK |
| A24 | YFWIVLMT | | FIYWLM |
| B7 | P | | VILFMWYA |
| B27 | RHK | | FYLWMIVA |
| B44 | ED | | FWYLIMVA |
| B58 | ATS | | FWYLIVMA |
| B62 | QLIVMP | | FWYMIVLA |
| MOTIFS | | | |
| A1 | TSM | | Y |
| A1 | | DEAS | Y |
| A2.1 | LMVQIAT | | VLIMAT |
| A3 | LMVISATFCGD | | KYRHFA |
| A11 | VTMLISAGNCDF | | KRYH |
| A24 | YFWM | | FLIW |
| A*3101 | MVTALIS | | RK |
| A*3301 | MVALFIST | | RK |
| A*6801 | AVTMSLI | | RK |
| B*0702 | P | | LMFWYAIV |
| B*3501 | P | | LMFWYIVA |
| B51 | P | | LIVFWYAM |
| B*5301 | P | | IMFWYALV |
| B*5401 | P | | ATIVLMFWY |

Bolded residues are preferred, italicized residues are less preferred: A peptide is considered motif-bearing if it has primary anchors at each primary anchor position for a motif or supermotif as specified in the above table.

TABLE II

| | POSITION | | | | | | | | |
|---|---|---|---|---|---|---|---|---|---|
| SUPERMOTIFS | [symbol] | [symbol] | [symbol] | [symbol] | [symbol] | [symbol] | [symbol] | [symbol] | C-terminus |

| | | | | | | | | | |
|---|---|---|---|---|---|---|---|---|---|
| A1 | | | 1° Anchor | | | | | | 1° Anchor |
| | | | TILVMS | | | | | | FWY |
| A2 | | | 1° Anchor | | | | | | 1° Anchor |
| | | | LIVMATQ | | | | | | LIVMAT |
| A3 | preferred | | 1° Anchor | YFW (4/5) | | YFW (3/5) | YFW (4/5) | P (4/5) | 1° Anchor |
| | | | VSMATLI | | | | | | RK |
| | deleterious | DE (3/5); | | DE (4/5) | | | | | |
| | | P (5/5) | | | | | | | |
| A24 | | | 1° Anchor | | | | | | 1° Anchor |
| | | | YFWIVLM | | | | | | FIYWLM |
| | | | T | | | | | | |
| B7 | preferred | FWY (5/5) | 1° Anchor | FWY (4/5) | | | | FWY (3/5) | 1° Anchor |
| | | LIVM (3/5) | P | | | | | | VILFMWYA |
| | deleterious | DE (3/5); | | | DE (3/5) | G (4/5) | QN (4/5) | DE (4/5) | |
| | | P(5/5); | | | | | | | |
| | | G(4/5); | | | | | | | |
| | | A(3/5); | | | | | | | |
| | | QN (3/5) | | | | | | | |
| B27 | | | 1° Anchor | | | | | | 1° Anchor |
| | | | RHK | | | | | | FYLWMIVA |
| B44 | | | 1° Anchor | | | | | | 1° Anchor |
| | | | ED | | | | | | FWYLIMVA |
| B58 | | | 1° Anchor | | | | | | 1+ Anchor |
| | | | ATS | | | | | | FWYLIVMA |
| B62 | | | 1° Anchor | | | | | | 1° Anchor |
| | | | QLIVMP | | | | | | FWYMIVLA |

| | POSITION | | | | | | | | |
|---|---|---|---|---|---|---|---|---|---|
| MOTIFS | [symbol] | [symbol] | [symbol] | [symbol] | [symbol] | [symbol] | [symbol] | [symbol] | C-teminus |

| | | | | | | | | | | |
|---|---|---|---|---|---|---|---|---|---|---|
| A1 | preferred | GFYW | 1° Anchor | DEA | YFW | | P | DEQN | YFW | 1° Anchor |
| 9-mer | | | STM | | | | | | | Y |
| | deleterious | DE | | RHKLIVM | A | G | A | | | |
| | | | | P | | | | | | |
| A1 | preferred | GRHK | ASTCLIV | 1° Anchor | GSTC | | ASTC | LIVM | DE | 1° Anchor |
| 9-mer | | | M | DEAS | | | | | | Y |
| | deleterious | A | RHKDEPY | | DE | PQN | RHK | PG | GP | |
| | | | FW | | | | | | | |

POSITION

| | | | | | | | | | | [symbol] | |
|---|---|---|---|---|---|---|---|---|---|---|---|
| | | | | | | | | | | or C- | C- |
| | | [symbol] | [symbol] | [symbol] | [symbol] | [symbol] | [symbol] | [symbol] | [symbol] | terminus | terminus |
| A1 | peferred | YFW | 1° Anchor | DEAQN | A | YFWQN | | PASTC | GDE | P | 1° Anchor |
| 10-mer | | | STM | | | | | | | | Y |
| | deleterious | GP | | RHKGLIV | DE | RHK | QNA | RHKYFW | RHK | A | |
| | | | | M | | | | | | | |
| A1 | preferred | YFW | STCLIVM | 1° Anchor | A | YFW | | PG | G | YFW | 1° Anchor |
| 10-mer | | | | DEAS | | | | | | | Y |
| | deleterious | RHK | RHKDEPY | | | P | G | | PRHK | QN | |
| | | | FW | | | | | | | | |
| A2.1 | preferred | YFW | 1° Anchor | YFW | STC | YFW | | A | P | 1° Anchor | |
| 9-mer | | | LMIVQAT | | | | | | | VLIMAT | |
| | deleterious | DEP | | DERKH | | | RKH | DERKH | | | |
| A2.1 | preferred | AYFW | 1° Anchor | LVIM | G | | G | | FYWL | | 1° Anchor |
| 10-mer | | | LMIVQAT | | | | | | VIM | | VLIMAT |
| | deleterious | DEP | | DE | RKHA | P | | RKH | DERK | RKH | |
| | | | | | | | | | H | | |
| A3 | preferred | RHK | 1° Anchor | YFW | PRHKYFW | A | YFW | | P | 1° Anchor | |
| | | | LMVISAT | | | | | | | KYRHFA | |
| | | | FCGD | | | | | | | | |
| | deleterious | DEP | | DE | | | | | | | |
| A11 | preferred | A | 1° Anchor | YFW | YFW | A | YFW | YFW | P | 1° Anchor | |
| | | | VTLMISA | | | | | | | KRYH | |
| | | | GNCDF | | | | | | | | |
| | deleterious | DEP | | | | | | A | G | | |
| A24 | preferred | YFWRHK | 1° Anchor | | STC | | | YFW | YFW | 1° Anchor | |
| 9-mer | | | YFWM | | | | | | | FLIW | |
| | deleterious | DEG | | DE | G | QNP | DERHK | G | AQN | | |
| A24 | preferred | | 1° Anchor | | P | YFWP | | P | | | 1° Anchor |
| 10-mer | | | YFWM | | | | | | | | FLIW |
| | deleterious | | | GDE | QN | RHK | DE | A | QN | DEA | |
| A3101 | preferred | RHK | 1° Anchor | YFW | P | | YFW | YFW | AP | 1° Anchor | |
| | | | MVTALIS | | | | | | | RK | |
| | deleterious | DEP | | DE | | ADE | DE | DE | DE | | |
| A3301 | preferred | | 1° Anchor | YFW | | | | AYFW | | 1° Anchor | |
| | | | MVALFIS | | | | | | | RK | |
| | | | T | | | | | | | | |
| | deleterious | GP | | DE | | | | | | | |
| A6801 | preferred | YFWSTC | 1° Anchor | | | YFWLIV | | YFW | P | 1° Anchor | |
| | | | AVTMSLI | | | M | | | | RK | |
| | deleterious | GP | | DEG | | RHK | | | A | | |
| B0702 | preferred | RHKFWY | 1° Anchor | RHK | | RHK | RHK | RHK | PA | 1° Anchor | |
| | | | P | | | | | | | LMFWYAIV | |
| | deleterious | DEQNP | | DEP | DE | DE | GDE | QN | DE | | |
| B3501 | preferred | FWYLIVM | 1° Anchor | FWY | | | | FWY | | 1° Anchor | |
| | | | P | | | | | | | LMFWYIVA | |
| | deleterious | AGP | | | | G | G | | | | |
| B51 | preferred | LIVMIFWY | 1° Anchor | FWY | STC | FWY | | G | FWY | 1° Anchor | |
| | | | P | | | | | | | LIVFWYAM | |
| | deleterious | AGPDERH | | | | DE | G | DEQN | GDE | | |
| | | KSTC | | | | | | | | | |
| B5301 | preferred | LIVMFWY | 1° Anchor | FWY | STC | FWY | | LIVMFWY | FWY | 1° Anohor | |
| | | | P | | | | | | | IMFWYALV | |
| | deleterious | AGPQN | | | | | G | RHKQN | DE | | |
| B5401 | preferred | FWY | 1° Anchor | FWYLIVM | | LIVM | | ALIVM | FWYAP | 1° Anchor | |
| | | | P | | | | | | | ATIVLMFW | |
| | | | | | | | | | | Y | |
| | deleterious | GPQNDE | | GDESTC | | RHKDE | DE | QNDGE | DE | | |

Italicized residues indicate less preferred or “tolerated” residues.
The information in Table II is specific for 9-mers unless otherwise specified.

TABLE III

| | POSITION | | | | | | | | |
|---|---|---|---|---|---|---|---|---|---|
| MOTIFS | [symbol] | [symbol] | [symbol] | [symbol] | [symbol] | [symbol] | [symbol] | [symbol] | [symbol] |

| | | | | | | | | | | |
|---|---|---|---|---|---|---|---|---|---|---|
| DR4 | preferred | FMYLIVW | M | T | | I | VSTCPALIM | MH | | MH |
| | deleterious | | | | W | | | R | | WDE |
| DR1 | preferred | MFLIVWY | | | PAMQ | | VMATSPLIC | M | | AVM |
| | deleterious | | C | CH | FD | CWD | | GDE | D | |
| DR7 | preferred | MFLIVWY | M | W | A | | IVMSACTPL | M | | IV |
| | deleterious | | C | | G | | | GRD | N | G |

| | | |
|---|---|---|
| DR Supermotif | MFLIVWY | VMSTACPLI |

| | | | | | | |
|---|---|---|---|---|---|---|
| DR3 MOTIFS | [symbol] | [symbol] | [symbol] | [symbol] | [symbol] | [symbol] |

| | | | |
|---|---|---|---|
| motif a | LIVMFY | D | |
| preferred | | | |
| motif b | LIVMFAY | DNQEST | KRH |
| preferred | | | |

Italicized residues indicate less preferred or “tolerated” residues.

TABLE IV
HLA Class I Standard Peptide Binding Affinity.

| | | | STANDARD |
|---|---|---|---|
| | STANDARD | | BINDING AFFINITY |
| ALLELE | PEPTIDE | SEQUENCE | (nM) |
| A*0101 | 944.02 | YLEPAIAKY | 25 |
| A*0201 | 941.01 | FLPSDYFPSV | 5.0 |
| A*0202 | 941.01 | FLPSDYFPSV | 4.3 |
| A*0203 | 941.01 | FLPSDYFPSV | 10 |
| A*0205 | 941.01 | FLPSDYFPSV | 4.3 |
| A*0206 | 941.01 | FLPSDYFPSV | 3.7 |
| A*0207 | 941.01 | FLPSDYFPSV | 23 |
| A*6802 | 1141.02 | FTQAGYPAL | 40 |
| A*0301 | 941.12 | KVFPYALINK | 11 |
| A*1101 | 940.06 | AVDLYHFLK | 6.0 |
| A*3101 | 941.12 | KVFPYALINK | 18 |
| A*3301 | 1083.02 | STLPETYVVRR | 29 |
| A*6801 | 941.12 | KVFPYALINK | 8.0 |
| A*2402 | 979.02 | AYIDNYNKF | 12 |
| B*0702 | 1075.23 | APRTLVYLL | 5.5 |
| B*3501 | 1021.05 | FPFKYAAAF | 7.2 |
| B51 | 1021.05 | FPFKYAAAF | 5.5 |
| B*5301 | 1021.05 | FPFKYAAAF | 9.3 |
| B*5401 | 1021.05 | FPFKYAAAF | 10 |

TABLE V
HLA Class II Standard Peptide Binding Affinity.

| | | | | Binding |
|---|---|---|---|---|
| | Nomen- | Standard | | Affinity |
| Allele | clature | Peptide | Sequence | (nM) |
| DRB1*0101 | DR1 | 515.01 | PKYVKQNTLKLAT | 5.0 |
| DRB1*0301 | DR3 | 829.02 | YKTIAFDEEARR | 300 |
| DRB1*0401 | DR4w4 | 515.01 | PKYVKQNTLKLAT | 45 |
| DRB1*0404 | DR4w14 | 717.01 | YARFQSQTTLKQKT | 50 |
| DRB1*0405 | DR4w15 | 717.01 | YARFQSQTTLKQKT | 38 |
| DRB1*0701 | DR7 | 553.01 | QYIKANSKFIGITE | 25 |
| DRB1*0802 | DR8w2 | 553.01 | QYIKANSKFIGITE | 49 |
| DRB1*0803 | DR8w3 | 553.01 | QYIKANSKFIGITE | 1600 |
| DRB1*0901 | DR9 | 553.01 | QYIKANSKFIGITE | 75 |
| DRB1*1101 | DR5w11 | 553.01 | QYIKANSKFIGITE | 20 |
| DRB1*1201 | DR5w12 | 1200.05 | EALIHQLKINPYVLS | 298 |
| DRB1*1302 | DR6w19 | 650.22 | QYIKANAKFIGITE | 3.5 |
| DRB1*1501 | DR2w2β1 | 507.02 | GRTQDENPVVHF | 9.1 |
| | | | FKNIVTPRTPPP | |
| DRB3*0101 | DR52a | 511 | NGQIGNDPNRDIL | 470 |
| DRB4*0101 | DRw53 | 717.01 | YARFQSQTTLKQKT | 58 |
| DRB5*0101 | DR2w2β2 | 553.01 | QYIKANSKFIGITE | 20 |

The “Nomenclature” column lists the allelic designations used in Tables XIX and XX.

TABLE VI

| HLA- | | |
|---|---|---|
| super- | Allele-specific HLA-supertype members | |
| type | Verified^{a} | Predicted^{b} |
| A1 | A*0101, A*2501, A*2601, A*2602, A*3201 | A*0102, A*2604, A*3601, A*4301, A*8001 |
| A2 | A*0201, A*0202, A*0203, A*0204, A*0205, A*0206, A*0207, | A*0208, A*0210, A*0211, A*0212, A*0213 |
| | A*0209, A*0214, A*6802, A*6901 | |
| A3 | A*0301, A*1101, A*3101, A*3301, A*6801 | A*0302, A*1102, A*2603, A*3302, A*3303, A*3401, A*3402, |
| | | A*6601, A*6602, A*7401 |
| A24 | A*2301, A*2402, A*3001 | A*2403, A*2404, A*3002, A*3003 |
| B7 | B*0702, B*0703, B*0704, B*0705, B*1508, B*3501, B*3502, | B*1511, B*4201, B*5901 |
| | B*3503, B*3504, B*3505, B*3506, B*3507, B*3508, B*5101, | |
| | B*5102, B*5103, B*5104, B*5105, B*5301, B*5401, B*5501, | |
| | B*5502, B*5601, B*5602, B*6701, B*7801 | |
| B27 | B*1401, B*1402, B*1509, B*2702, B*2703, B*2704, B*2705, | B*2701, B*2707, B*2708, B*3802, B*3903, B*3904, B*3905, |
| | B*2706, B*3801, B*3901, B*3902, B*7301 | B*4801, B*4802, B*1510, B*1518, B*1503 |
| B44 | B*1801, B*1802, B*3701, B*4402, B*4403, B*4404, B*4001, | B*4101, B*4501, B*4701, B*4901, B*5001 |
| | B*4002, B*4006 | |
| B58 | B*5701, B*5702, B*5801, B*5802, B*1516, B*1517 | |
| B62 | B*1501, B*1502, B*1513, B*5201 | B*1301, B*1302, B*1504, B*1505, B*1506, B*1507, B*1515, |
| | | B*1520, B*1521, B*1512, B*1514, B*1519 |

^{a}Verified alleles includes alleles whose specificity has been determined by pool sequencing analysis, peptide binding assays, or by analysis of the sequences of CTL epitopes.
^{b}Predicted alleles are alleles whose specificity is predicted on the basis of B and F pocket structure to overlap with the supertype specificity.

TABLE VII
HCV A01 Super Motif with Binding Information

| | | No. of | | Con- | |
|---|---|---|---|---|---|
| | | Amino | Sequence | servancy | |
| Sequence | Position | Acids | Frequency | (%) | A*0101 |
| ATGNLPGCSF | 165 | 10 | 13 | 93 | |
| ATLGFGAY | 1285 | 8 | 14 | 100 | |
| AVQWMNRLIAF | 1917 | 11 | 14 | 100 | |
| CTCGSSDLY | 1128 | 9 | 11 | 79 | 0.3700 |
| CTRGVAKAVDF | 1190 | 11 | 11 | 79 | |
| CTWMNSTGF | 555 | 9 | 11 | 79 | |
| CVTQTVDF | 1462 | 8 | 12 | 86 | |
| DLEVVTSTW | 1857 | 9 | 12 | 86 | |
| ETTMRSPVF | 1207 | 9 | 12 | 86 | |
| FSYDTRCF | 2670 | 8 | 11 | 79 | |
| FTEAMTRY | 2792 | 8 | 14 | 100 | |
| FTGLTHIDAHF | 1567 | 11 | 13 | 93 | |
| GLPVCQDHLEF | 1552 | 11 | 12 | 86 | |
| GLSAFSLHSY | 2921 | 10 | 11 | 79 | 0.0029 |
| GLTHIDAHF | 1569 | 9 | 13 | 93 | |
| GSSYGFQY | 2641 | 8 | 11 | 79 | |
| GTFPINAY | 2063 | 8 | 11 | 79 | |
| GVAGALVAF | 1863 | 9 | 12 | 86 | |
| GVAKAVDF | 1193 | 8 | 11 | 79 | |
| GVLAALAAY | 1670 | 9 | 12 | 86 | |
| GVRVCEKMALY | 2619 | 11 | 14 | 100 | |
| GVRVLEDGVNY | 154 | 11 | 12 | 86 | |
| HLHQNIVDVQY | 696 | 11 | 11 | 79 | |
| HMWNFISGIQY | 1769 | 11 | 13 | 93 | |
| HVGPGEGAVQW | 1910 | 11 | 11 | 79 | |
| IMAKNEVF | 2591 | 8 | 12 | 86 | |
| ITYSTYGKF | 1296 | 9 | 12 | 86 | |
| IVDVQYLY | 701 | 8 | 12 | 86 | |
| KSTKVPAAY | 1241 | 9 | 12 | 86 | 0.0130 |
| KVIDTLTCGF | 121 | 10 | 12 | 86 | |
| LIEANLLW | 2235 | 8 | 12 | 86 | |
| LINTNGSW | 414 | 8 | 11 | 79 | |
| LLAPITAY | 1030 | 8 | 14 | 100 | |
| LLFNILGGW | 1812 | 9 | 12 | 86 | |
| LLSPRGSRPSW | 97 | 11 | 11 | 79 | |
| LSAFSLHSY | 2922 | 9 | 11 | 79 | 0.8100 |
| LSPRGSRPSW | 98 | 10 | 11 | 79 | |
| LTCGFADLMGY | 126 | 11 | 12 | 86 | |
| LTHIDAHF | 1570 | 8 | 13 | 93 | |
| LVDILAGY | 1853 | 8 | 11 | 79 | |
| MILMTHFF | 2876 | 8 | 12 | 86 | |
| NIVDVQYLY | 700 | 9 | 12 | 86 | 0.0980 |
| NLPGCSFSIF | 168 | 10 | 13 | 93 | |
| NTCVTQTVDF | 1460 | 10 | 12 | 86 | |
| NTNRRPQDVKF | 14 | 11 | 11 | 79 | |
| NVDQDLVGW | 1108 | 9 | 11 | 79 | |
| PITYSTYGKF | 1295 | 10 | 11 | 79 | |
| PMGFSYDTRCF | 2667 | 11 | 11 | 79 | |
| PSVAATLGF | 1281 | 9 | 14 | 100 | |
| PTLHGPTPLLY | 1621 | 11 | 11 | 79 | |
| PVCQDHLEF | 1554 | 9 | 12 | 86 | |
| PVCQDHLEFW | 1554 | 10 | 12 | 86 | |
| QTVDFSLDPTF | 1465 | 11 | 12 | 86 | |
| RLHGLSAF | 2918 | 8 | 12 | 86 | |
| RLLAPITAY | 1029 | 9 | 12 | 86 | |
| RMAWDMMMNW | 317 | 10 | 12 | 86 | |
| RMILMTHF | 2875 | 8 | 12 | 86 | |
| RMILMTHFF | 2875 | 9 | 12 | 86 | |
| RVCEKMALY | 2621 | 9 | 14 | 100 | |
| RVLEDGVNY | 156 | 9 | 14 | 86 | |
| STKVPAAY | 1242 | 8 | 11 | 86 | |
| SVAATLGF | 1262 | 8 | 11 | 100 | |
| SVAATLGFGAY | 1262 | 11 | 12 | 100 | |
| TIMAKNEVF | 2590 | 9 | 11 | 79 | |
| TLHGPTPLLY | 1622 | 10 | 11 | 79 | 0.0300 |
| TLLFNILGGW | 1811 | 10 | 12 | 86 | |
| TTIMAKNEVF | 2509 | 10 | 11 | 79 | |
| TTMRSPVF | 1208 | 8 | 12 | 86 | |
| TVDFSLDPTF | 1466 | 10 | 12 | 86 | |
| VIDTLTCGF | 122 | 9 | 12 | 86 | |
| VLAALAAY | 1871 | 8 | 12 | 86 | |
| VLEDGVNY | 157 | 8 | 12 | 86 | |
| VLVDILAGY | 1852 | 9 | 11 | 79 | |
| VMGSSYGF | 2639 | 8 | 11 | 79 | |
| VMGSSYGFQY | 2639 | 10 | 11 | 79 | |
| WMNRLIAF | 1920 | 8 | 14 | 100 | |
| YSPGQRVEF | 2648 | 9 | 11 | 79 | |
| YTNVDQDLVGW | 1106 | 11 | 11 | 79 | |
| YVGDLCGSVF | 276 | 10 | 12 | 86 | |
| 79 | | 2 | | | |

TABLE VIII
HCV A02 Super Motif with Binding Information

| | | | | | | | | |
|---|---|---|---|---|---|---|---|---|
| Conservancy | Freq. | Position | Sequence | A*0201 | A*0202 | A*0203 | A*0206 | A*6802 |

| | | | | | | | | |
|---|---|---|---|---|---|---|---|---|
| 93 | 13 | 1904 | AAILRRHV | | | | | |
| 86 | 12 | 1673 | AALAAYCL | | | | | |
| 79 | 11 | 1250 | AAQGYKVL | | | | | |
| 79 | 11 | 1250 | AAQGYKVLV | | | | | |
| 79 | 11 | 1250 | AAQGYKVLVL | | | | | |
| 79 | 11 | 147 | AARALAHGV | | | | | |
| 79 | 11 | 147 | AARALAHGVRV | | | | | |
| 100 | 14 | 1264 | AATLGFGA | | | | | |
| 93 | 13 | 1264 | AATLGFGAYM | | | | | |
| 86 | 12 | 1187 | AAVCTRGV | | | | | |
| 79 | 11 | 1187 | AAVCTRGVA | | | | | |
| 79 | 11 | 1187 | AAVCTRGVAKA | | | | | |
| 93 | 13 | 1890 | AILSPGAL | | | | | |
| 86 | 12 | 1890 | AILSPGALV | 0.0014 | | | | |
| 86 | 12 | 1890 | AILSPGALVV | 0.0035 | | | | |
| 100 | 14 | 150 | ALAHGVRV | | | | | |
| 100 | 14 | 150 | ALAHGVRVL | 0.0037 | | | | |
| 86 | 12 | 1737 | ALGLLQTA | | | | | |
| 86 | 12 | 689 | ALSTGLIHL | 0.0160 | 0.0006 | 0.2200 | 0.0002 | 0.0039 |
| 79 | 11 | 1896 | ALVVGVVCA | 0.0010 | | | | |
| 79 | 11 | 1896 | ALVVGVVCAA | | | | | |
| 79 | 11 | 1896 | ALVVGVVCAAI | | | | | |
| 86 | 12 | 1602 | AQAPPPSWDQM | | | | | |
| 79 | 11 | 1251 | AQGYKVLV | | | | | |
| 79 | 11 | 1251 | AQGYKVLVL | | | | | |
| 86 | 12 | 77 | AQPGYPWPL | | | | | |
| 93 | 13 | 1285 | ATLGFGAYM | | | | | |
| 79 | 11 | 1354 | ATPPGSVT | | | | | |
| 79 | 11 | 1596 | ATVCARAQA | | | | | |
| 100 | 14 | 1419 | AVAYYRGL | | | | | |
| 100 | 14 | 1419 | AVAYYRGLDV | 0.0002 | | | | |
| 79 | 11 | 1188 | AVCTRGVA | | | | | |
| 79 | 11 | 1188 | AVCTRGVAKA | | | | | |
| 79 | 11 | 1188 | AVCTRGVAKAV | | | | | |
| 100 | 14 | 1917 | AVQWMNRL | | | | | |
| 100 | 14 | 1917 | AVQWMNRLI | 0.0001 | | | | |
| 100 | 14 | 1917 | AVQWMNRLIA | | | | | |
| 93 | 13 | 1903 | CAAILRRHV | | | | | |
| 79 | 11 | 1530 | CAWYELTPA | | | | | |
| 86 | 12 | 2941 | CLRKLGVPPL | 0.0002 | | | | |
| 86 | 12 | 739 | CLWMMLLI | | | | | |
| 79 | 11 | 1653 | CMSADLEV | | | | | |
| 79 | 11 | 1653 | CMSADLEVV | 0.0067 | | | | |
| 79 | 11 | 1653 | CMSADLEVVT | | | | | |
| 79 | 11 | 1128 | CTCGSSDL | | | | | |
| 79 | 11 | 1128 | CTCGSSDLYL | | | | | |
| 79 | 11 | 1128 | CTCGSSDLYLV | | | | | |
| 79 | 11 | 1190 | CTRGVAKA | | | | | |
| 79 | 11 | 1190 | CTRGVAKAV | | | | | |
| 79 | 11 | 555 | CTWMNSTGFT | | | | | |
| 86 | 12 | 1462 | CVTQTVDFSL | 0.0006 | | | | |
| 79 | 11 | 1527 | DAGCAWYEL | | | | | |
| 100 | 14 | 1574 | DAHFLSQT | | | | | |
| 86 | 12 | 1855 | DILAGYGA | | | | | |
| 79 | 11 | 1855 | DILAGYGAGV | 0.0002 | | | | |
| 79 | 11 | 1855 | DILAGYGAGVA | | | | | |
| 86 | 12 | 279 | DLCGSVFL | | | | | |
| 79 | 11 | 279 | DLCGSVFLV | 0.0007 | | | | |
| 86 | 12 | 1657 | DLEVVTST | | | | | |
| 86 | 12 | 1657 | DLEVVTSTWV | 0.0002 | | | | |
| 86 | 12 | 1657 | DLEVVTSTWVL | | | | | |
| 93 | 13 | 2617 | DLGVRVGEKM | | | | | |
| 93 | 13 | 2617 | DLGVRVCEKMA | | | | | |
| 79 | 11 | 132 | DLMGYIPL | | | | | |
| 79 | 11 | 132 | DLMGYIPLV | 0.0630 | 0.0009 | 0.0490 | 0.0077 | 3.3000 |
| 79 | 11 | 132 | DLMGYIPLVGA | | | | | |
| 79 | 11 | 2412 | DLSDGSWST | | | | | |
| 79 | 11 | 2412 | DLSDGSWSTV | 0.0008 | | | | |
| 79 | 11 | 1883 | DLVNLLPA | | | | | |
| 79 | 11 | 1883 | DLVNLLPAI | 0.0001 | | | | |
| 79 | 11 | 1883 | DLVNLLPAIL | 0.0001 | | | | |
| 79 | 11 | 2772 | DLVVICESA | | | | | |
| 86 | 12 | 1134 | DLYLVTRHA | 0.0001 | | | | |
| 86 | 12 | 1134 | DLYLVTRHADV | | | | | |
| 86 | 12 | 321 | DMMMNWSPT | | | | | |
| 86 | 12 | 1339 | DQAETAGA | | | | | |
| 86 | 12 | 1339 | DQAETAGARL | | | | | |
| 86 | 12 | 1339 | DQAETAGARLV | | | | | |
| 86 | 12 | 994 | DTAACGDI | | | | | |
| 86 | 12 | 994 | DTAACGDII | | | | | |
| 86 | 12 | 124 | DTLTCGFA | | | | | |
| 86 | 12 | 124 | DTLTCGFADL | | | | | |
| 86 | 12 | 124 | DTLTCGFADLM | | | | | |
| 93 | 13 | 2673 | DTRCFDST | | | | | |
| 93 | 13 | 2673 | DTRCFDSTV | | | | | |
| 93 | 13 | 2673 | DTRCFDSTVT | | | | | |
| 86 | 12 | 21 | DVKFPGGGQI | 0.0001 | | | | |
| 86 | 12 | 21 | DVKFPGGGQIV | | | | | |
| 79 | 11 | 750 | EAALENLV | | | | | |
| 100 | 14 | 2794 | EAMTRYSA | | | | | |
| 86 | 12 | 2237 | EANLLWRQEM | | | | | |
| 93 | 13 | 1377 | EIPFYGKA | | | | | |
| 93 | 13 | 1377 | EIPFYGKAI | 0.0001 | | | | |
| 100 | 14 | 2814 | ELITSCSSNV | 0.0002 | | | | |
| 79 | 11 | 666 | ELSPLLLST | | | | | |
| 79 | 11 | 666 | ELSPLLLSTT | | | | | |
| 86 | 12 | 2245 | EMGGNITRV | 0.0003 | | | | |
| 86 | 12 | 1731 | EQFKQKAL | | | | | |
| 86 | 12 | 1731 | EQFKQKALGL | | | | | |
| 86 | 12 | 1731 | EQFKQKALGLL | | | | | |
| 86 | 12 | 1342 | ETAGARLV | | | | | |
| 86 | 12 | 1342 | ETAGARLVV | | | | | |
| 86 | 12 | 1342 | ETAGARLVVL | | | | | |
| 86 | 12 | 1342 | ETAGARLVVLA | | | | | |
| 86 | 12 | 1207 | ETTMRSPV | | | | | |
| 86 | 12 | 1207 | ETTMRSPVFT | | | | | |
| 86 | 12 | 1659 | EVVTSTWV | | | | | |
| 86 | 12 | 1659 | EVVTSTWVL | 0.0001 | | | | |
| 86 | 12 | 1659 | EVVTSTWVLV | 0.0004 | | | | |
| 93 | 13 | 130 | FADLMGYI | | | | | |
| 79 | 11 | 130 | FADLMGYIPL | | | | | |
| 79 | 11 | 130 | FADLMGYIPLV | | | | | |
| 100 | 14 | 1927 | FASRGNHV | | | | | |
| 86 | 12 | 1927 | FASRGNHVSPT | | | | | |
| 100 | 14 | 1773 | FISGIQYL | | | | | |
| 100 | 14 | 1773 | FISGIQYLA | 0.1000 | | | | |
| 100 | 14 | 1773 | FISGIQYLAGL | | | | | |
| 79 | 11 | 1304 | FLADGGCSGGA | | | | | |
| 86 | 12 | 177 | FLLALLSCL | 0.0046 | | | | |
| 86 | 12 | 177 | FLLALLSCLT | | | | | |
| 93 | 13 | 728 | FLLLADARV | 0.2800 | 0.0480 | 0.0670 | 0.0150 | 0.3600 |
| 86 | 12 | 1228 | FQVAHLHA | | | | | |
| 86 | 12 | 1228 | FQVAHLHAPT | | | | | |
| 79 | 11 | 2646 | FQYSPGQRV | | | | | |
| 100 | 14 | 2792 | FTEAMTRYSA | | | | | |
| 93 | 13 | 1567 | FTGLTHIDA | | | | | |
| 93 | 13 | 512 | FTPSPVVV | | | | | |
| 93 | 13 | 512 | FTPSPVVVGT | | | | | |
| 93 | 13 | 512 | FTPSPVVVGTT | | | | | |
| 79 | 11 | 684 | FTTLPALST | | | | | |
| 79 | 11 | 684 | FTTLPALSTGL | | | | | |
| 79 | 11 | 146 | GAARALAHGV | | | | | |
| 86 | 12 | 992 | GADTAACGDI | | | | | |
| 86 | 12 | 992 | GADTAACGDII | | | | | |
| 86 | 12 | 1861 | GAGVAGAL | | | | | |
| 86 | 12 | 1861 | GAGVAGALV | | | | | |
| 86 | 12 | 1861 | GAGVAGALVA | | | | | |
| 86 | 12 | 350 | GAHWGVLA | | | | | |
| 79 | 11 | 1895 | GALVVGVV | | | | | |
| 79 | 11 | 1895 | GALVVGVVCA | | | | | |
| 79 | 11 | 1895 | GALVVGVVCAA | | | | | |
| 86 | 12 | 1345 | GARLVVLA | | | | | |
| 79 | 11 | 1345 | GARLVVLAT | | | | | |
| 79 | 11 | 1345 | GARLVVLATA | | | | | |
| 79 | 11 | 1345 | GARLVVLATAT | | | | | |
| 100 | 14 | 1916 | GAVQWMNRL | 0.0001 | | | | |
| 100 | 14 | 1916 | GAVQWMNRLI | | | | | |
| 100 | 14 | 1916 | GAVQWMNRLIA | | | | | |
| 100 | 14 | 1333 | GIGTVLDQA | | | | | |
| 100 | 14 | 1333 | GIGTVLDQAET | | | | | |
| 100 | 14 | 1776 | GIQYLAGL | | | | | |
| 100 | 14 | 1776 | GIQYLAGLST | | | | | |
| 100 | 14 | 1176 | GIQYLAGLSTL | | | | | |
| 79 | 11 | 1425 | GLDVSVIPT | | | | | |
| 93 | 13 | 1552 | GLPVCQDHL | 0.0001 | | | | |
| 79 | 11 | 968 | GLRDLAVA | | | | | |
| 79 | 11 | 968 | GLRDLAVAV | 0.0034 | | | | |
| 100 | 14 | 1782 | GLSTLPGNPA | | | | | |
| 79 | 11 | 1782 | GLSTLPGNPAI | | | | | |
| 93 | 13 | 1569 | GLTHIDAHFL | 0.0007 | | | | |
| 93 | 13 | 28 | GQIVGGVYL | | | | | |
| 93 | 13 | 28 | GQIVGGVYLL | | | | | |
| 79 | 11 | 2063 | GTFPINAYT | | | | | |
| 79 | 11 | 2063 | GTFPINAYTT | | | | | |
| 100 | 14 | 1335 | GTVLDQAET | | | | | |
| 100 | 14 | 1335 | GTVLDQAETA | | | | | |
| 86 | 12 | 1863 | GVAGALVA | | | | | |
| 79 | 11 | 1081 | GVCWTVYHGA | | | | | |
| 86 | 12 | 1670 | GVLAALAA | | | | | |
| 86 | 12 | 1670 | GVLAALAAYCL | | | | | |
| 79 | 11 | 161 | GVNYATGNL | 0.0001 | | | | |
| 86 | 12 | 45 | GVRATRKT | | | | | |
| 100 | 14 | 2619 | GVRVCEKM | | | | | |
| 100 | 14 | 2619 | GVRVCEKMA | | | | | |
| 100 | 14 | 2619 | GVRVCEKMAL | 0.0002 | | | | |
| 93 | 13 | 154 | GVRVLEDGV | 0.0001 | | | | |
| 79 | 11 | 1900 | GVVCAAIL | | | | | |
| 100 | 14 | 1234 | HAPTGSGKST | | | | | |
| 100 | 14 | 1572 | HIDAHFLSQT | | | | | |
| 86 | 12 | 696 | HLHQNIVDV | 0.0100 | 0.0014 | 0.5400 | 0.0027 | 0.0037 |
| 79 | 11 | 1719 | HLPYIEQGM | | | | | |
| 93 | 13 | 1769 | HMWNFISGI | 0.3300 | 0.0004 | 0.1300 | 0.0280 | 0.0053 |
| 79 | 11 | 698 | HQNIVDVQYL | | | | | |
| 79 | 11 | 222 | HTPGCVPCV | | | | | |
| 86 | 12 | 2855 | HTPVNSWL | | | | | |
| 86 | 12 | 2855 | HTPVNSWLGNI | | | | | |
| 79 | 11 | 1910 | HVGPGEGA | | | | | |
| 79 | 11 | 1910 | HVGPGEGAV | | | | | |
| 86 | 12 | 1933 | HVSPTHYV | | | | | |
| 100 | 14 | 1925 | IAFASRGNHV | | | | | |
| 79 | 11 | 1856 | ILAGYGAGV | 0.0430 | 0.0300 | 2.0000 | 0.0049 | 0.0450 |
| 79 | 11 | 1856 | ILAGYGAGVA | 0.0002 | | | | |
| 86 | 12 | 1816 | ILGGWVAA | | | | | |
| 86 | 12 | 1816 | ILGGWVAAQL | 0.0430 | 0.0024 | 0.0190 | 0.0005 | 0.0039 |
| 86 | 12 | 1816 | ILGGWVAAQLA | | | | | |
| 86 | 12 | 1331 | ILGIGTVL | | | | | |
| 86 | 12 | 1331 | ILGIGTVLDQA | | | | | |
| 93 | 13 | 1891 | ILSPGALV | | | | | |
| 93 | 13 | 1891 | ILSPGALVV | 0.0210 | 0.0004 | 0.3700 | 0.0036 | 0.0130 |
| 93 | 13 | 1891 | ILSPGALVVGV | | | | | |
| 79 | 11 | 2591 | IMAKNEVFCV | 0.0088 | | | | |
| 100 | 14 | 1777 | IQYLAGLST | | | | | |
| 100 | 14 | 1777 | IQYLAGLSTL | | | | | |
| 86 | 12 | 2250 | ITRVESENKV | | | | | |
| 86 | 12 | 2250 | ITRVESENKVV | | | | | |
| 100 | 14 | 2816 | ITSCSSNV | | | | | |
| 100 | 14 | 2816 | ITSCSSNVSV | | | | | |
| 100 | 14 | 2816 | ITSCSSNVSVA | | | | | |
| 86 | 12 | 909 | ITWGADTA | | | | | |
| 86 | 12 | 969 | ITWGADTAA | | | | | |
| 79 | 11 | 1296 | ITYSTYGKFL | | | | | |
| 79 | 11 | 1296 | ITYSTYGKFLA | | | | | |
| 79 | 11 | 2613 | IVFPDLGV | | | | | |
| 79 | 11 | 2613 | IVFPDLGVRV | 0.0016 | | | | |
| 93 | 13 | 30 | IVGGVYLL | | | | | |
| 86 | 12 | 1736 | KALGLLQT | | | | | |
| 86 | 12 | 1736 | KALGLLQTA | | | | | |
| 86 | 12 | 2625 | KMALYDVV | | | | | |
| 86 | 12 | 1734 | KQKALGLL | | | | | |
| 86 | 12 | 1734 | KQKALGLLQT | | | | | |
| 86 | 12 | 1734 | KQKALGLLQTA | | | | | |
| 86 | 12 | 121 | KVIDTLTCGFA | | | | | |
| 100 | 14 | 1255 | KVLVLNPSV | 0.0048 | | | | |
| 100 | 14 | 1255 | KVLVLNPSVA | | | | | |
| 100 | 14 | 1255 | KVLVLNPSVAA | | | | | |
| 79 | 11 | 1244 | KVPAAYAA | | | | | |
| 86 | 12 | 1672 | LAALAAYCL | 0.0011 | | | | |
| 79 | 11 | 1305 | LADGGCSGGA | | | | | |
| 86 | 12 | 1729 | LAEQFKQKA | | | | | |
| 86 | 12 | 1729 | LAEQFKQKAL | | | | | |
| 79 | 11 | 1857 | LAGYGAGV | | | | | |
| 79 | 11 | 1857 | LAGYGAGVA | | | | | |
| 79 | 11 | 1857 | LAGYGAGVAGA | | | | | |
| 100 | 14 | 151 | LAHGVRVL | | | | | |
| 86 | 12 | 179 | LALLSCLT | | | | | |
| 79 | 11 | 972 | LAVAVEPV | | | | | |
| 100 | 14 | 1924 | LIAFASRGNHV | | | | | |
| 100 | 14 | 2815 | LITSCSSNV | 0.0004 | | | | |
| 100 | 14 | 2815 | LITSCSSNVSV | | | | | |
| 79 | 11 | 2612 | LIVFPDLGV | 0.0002 | | | | |
| 79 | 11 | 2612 | LIVFPDLGVRV | | | | | |
| 86 | 12 | 178 | LLALLSCL | | | | | |
| 86 | 12 | 178 | LLALLSCLT | | | | | |
| 100 | 14 | 726 | LLFLLLADA | 0.0230 | 0.0150 | 0.0220 | 0.0011 | 0.0130 |
| 93 | 13 | 726 | LLFLLLADARV | | | | | |
| 86 | 12 | 1812 | LLFNILGGWV | 1.2000 | 0.0380 | 3.1000 | 0.1900 | 1.2000 |
| 86 | 12 | 1812 | LLFNILGGWVA | | | | | |
| 93 | 13 | 729 | LLLADARV | | | | | |
| 93 | 13 | 1887 | LLPAILSPGA | 0.0061 | | | | |
| 93 | 13 | 1887 | LLPAILSPGAL | | | | | |
| 93 | 13 | 36 | LLPRRGPRL | 0.0025 | | | | |
| 93 | 13 | 36 | LLPRRGPRLGV | | | | | |
| 56 | 12 | 2240 | LLWRQEMGGNI | | | | | |
| 93 | 13 | 1629 | LLYRLGAV | | | | | |
| 79 | 11 | 133 | LMGYIPLV | | | | | |
| 79 | 11 | 133 | LMGYIPLVGA | | | | | |
| 86 | 12 | 2761 | LQDCTMLV | | | | | |
| 86 | 12 | 126 | LTCGFADL | | | | | |
| 86 | 12 | 126 | LTCGFADLM | | | | | |
| 100 | 14 | 2180 | LTDPSHIT | | | | | |
| 100 | 14 | 2180 | LTDPSHITA | | | | | |
| 86 | 12 | 1052 | LTGRDKNQV | | | | | |
| 93 | 13 | 1570 | LTHIDAHFL | | | | | |
| 93 | 13 | 2176 | LTSMLTDPSHI | | | | | |
| 79 | 11 | 2738 | LTTSCGNT | | | | | |
| 79 | 11 | 2738 | LTTSCGNTL | | | | | |
| 79 | 11 | 2738 | LTTSCGNTLT | | | | | |
| 86 | 12 | 1591 | LVAYQATV | | | | | |
| 86 | 12 | 1591 | LVAYQATVCA | 0.0002 | | | | |
| 79 | 11 | 1853 | LVDILAGYGA | −0.0001 | | | | |
| 86 | 12 | 1667 | LVGGVLAA | | | | | |
| 86 | 12 | 1667 | LVGGVLAAL | 0.0003 | | | | |
| 86 | 12 | 1667 | LVGGVLAALA | | | | | |
| 86 | 12 | 1667 | LVGGVLAALAA | | | | | |
| 100 | 14 | 1257 | LVLNPSVA | | | | | |
| 100 | 14 | 1257 | LVLNPSVAA | | | | | |
| 100 | 14 | 1257 | LVLNPSVAAT | | | | | |
| 100 | 14 | 1257 | LVLNPSVAATL | | | | | |
| 79 | 11 | 1884 | LVNLLPAI | | | | | |
| 79 | 11 | 1884 | LVNLLPAIL | 0.0002 | | | | |
| 86 | 12 | 1137 | LVTRHADV | | | | | |
| 79 | 11 | 1137 | LVTRHADVI | 0.0001 | | | | |
| 79 | 11 | 1137 | LVTRHADVIPV | | | | | |
| 79 | 11 | 1897 | LVVGVVCA | | | | | |
| 79 | 11 | 1897 | LVVGVVCAA | | | | | |
| 79 | 11 | 1897 | LVVGVVCAAI | 0.0011 | | | | |
| 79 | 11 | 1897 | LVVGVVCAAIL | | | | | |
| 79 | 11 | 2773 | LVVICESA | | | | | |
| 86 | 12 | 1348 | LVVLATAT | | | | | |
| 86 | 12 | 2592 | MAKNEVFCV | 0.0022 | | | | |
| 100 | 14 | 2179 | MLTDPSHI | | | | | |
| 100 | 14 | 2179 | MLTDPSHIT | 0.0002 | | | | |
| 100 | 14 | 2179 | MLTDPSHITA | | | | | |
| 93 | 13 | 322 | MMMNWSPT | | | | | |
| 93 | 13 | 1418 | NAVAYYRGL | | | | | |
| 93 | 13 | 1418 | NAVAYYRGLDV | | | | | |
| 86 | 12 | 2068 | NAYTTGPCT | | | | | |
| 86 | 12 | 1815 | NILGGWVA | | | | | |
| 86 | 12 | 1815 | NILGGWVAA | | | | | |
| 86 | 12 | 1815 | NILGGWVAAGL | | | | | |
| 93 | 13 | 1282 | NIRTGVRT | | | | | |
| 79 | 11 | 1282 | NIRTGVRTI | 0.0001 | | | | |
| 79 | 11 | 1282 | NIRTGVRTIT | | | | | |
| 79 | 11 | 1282 | NIRTGVRTITT | | | | | |
| 86 | 12 | 2249 | NITRVESENKV | | | | | |
| 86 | 12 | 700 | NIVDVQYL | | | | | |
| 86 | 12 | 118 | NLGKVIDT | | | | | |
| 86 | 12 | 118 | NLGKVIDTL | 0.0006 | | | | |
| 86 | 12 | 118 | NLGKVIDTLT | | | | | |
| 93 | 13 | 1888 | NLLPAILSPGA | | | | | |
| 86 | 12 | 2239 | NLLWRQEM | | | | | |
| 93 | 13 | 168 | NLPGCSFSI | 0.0041 | | | | |
| 93 | 13 | 168 | NLPGCSFSIFL | | | | | |
| 86 | 12 | 1460 | NTCVTQTV | | | | | |
| 93 | 13 | 416 | NTNGSWHI | | | | | |
| 86 | 12 | 14 | NTNRRPQDV | | | | | |
| 93 | 13 | 1889 | PAILSPGA | | | | | |
| 93 | 13 | 1889 | PAILSPGAL | | | | | |
| 86 | 12 | 1889 | PAILSPGALV | | | | | |
| 86 | 12 | 1889 | PAILSPGALVV | | | | | |
| 86 | 12 | 688 | PALSTGLI | | | | | |
| 86 | 12 | 688 | PALSTGLIHL | | | | | |
| 79 | 11 | 2609 | PARLIVFPDL | | | | | |
| 79 | 11 | 2066 | PINAYTTGPCT | | | | | |
| 79 | 11 | 1295 | PITYSTYGKFL | | | | | |
| 93 | 13 | 2403 | PLEGEPGDPDL | | | | | |
| 79 | 11 | 143 | PLGGAARA | | | | | |
| 79 | 11 | 143 | PLGGAARAL | 0.0001 | | | | |
| 79 | 11 | 143 | PLGGAARALA | | | | | |
| 93 | 13 | 1628 | PLLYRLGA | | | | | |
| 93 | 13 | 1628 | PLLYRLGAV | 0.0001 | | | | |
| 79 | 11 | 2667 | PMGFSYDT | | | | | |
| 79 | 11 | 2807 | PQPEYDLEL | | | | | |
| 79 | 11 | 2807 | PQPEYDLELI | | | | | |
| 79 | 11 | 2807 | PQPEYDLELIT | | | | | |
| 93 | 13 | 7 | PQRKTKRNT | | | | | |
| 86 | 12 | 109 | PTDPRRRSRNL | | | | | |
| 79 | 11 | 1473 | PTFTIETT | | | | | |
| 79 | 11 | 1473 | PTFTIETTT | | | | | |
| 100 | 14 | 1236 | PTGSGKST | | | | | |
| 93 | 13 | 1236 | PTGSGKSTKV | | | | | |
| 86 | 12 | 1936 | PTHYVPESDA | | | | | |
| 86 | 12 | 1936 | PTHYVPESDAA | | | | | |
| 79 | 11 | 1621 | PTLHGPTPL | | | | | |
| 79 | 11 | 1621 | PTLHGPTPLL | | | | | |
| 79 | 11 | 2870 | PTLWARMI | | | | | |
| 79 | 11 | 2870 | PTLWARMIL | | | | | |
| 79 | 11 | 2870 | PTLWARMILM | | | | | |
| 79 | 11 | 2870 | PTLWARMILMT | | | | | |
| 100 | 14 | 1626 | PTPLLYRL | | | | | |
| 93 | 13 | 1626 | PTPLLYRLGA | | | | | |
| 93 | 13 | 1626 | PTPLLYRLGAV | | | | | |
| 100 | 14 | 2857 | PVNSWLGNI | 0.0001 | | | | |
| 100 | 14 | 2857 | PVNSWLGNII | 0.0001 | | | | |
| 86 | 12 | 2857 | PVNSWLGNIIM | | | | | |
| 79 | 11 | 2318 | PVVHGCPL | | | | | |
| 93 | 13 | 508 | PVYCFTPSPV | 0.0004 | | | | |
| 93 | 13 | 508 | PVYCFTPSPVV | | | | | |
| 86 | 12 | 1340 | QAETAGARL | | | | | |
| 86 | 12 | 1340 | QAETAGARLV | | | | | |
| 86 | 12 | 1340 | QAETAGARLVV | | | | | |
| 86 | 12 | 1603 | QAPPPSWDQM | | | | | |
| 93 | 13 | 1595 | QATVCARA | | | | | |
| 79 | 11 | 1595 | QATVCARAQA | | | | | |
| 93 | 13 | 29 | QIVGGVYL | | | | | |
| 93 | 13 | 29 | QIVGGVYLL | 0.0015 | | | | |
| 86 | 12 | 338 | QLLRIPQA | | | | | |
| 86 | 12 | 2164 | QLPCEPEPDV | 0.0002 | | | | |
| 79 | 11 | 2210 | QLSAPSLKA | | | | | |
| 79 | 11 | 2210 | QLSAPSLKAT | | | | | |
| 86 | 12 | 1466 | QTVDFGLDPT | | | | | |
| 86 | 12 | 1229 | QVAHLHAPT | | | | | |
| 86 | 12 | 1186 | RAAVCTRGV | | | | | |
| 79 | 11 | 1186 | RAAVCTRGVA | | | | | |
| 100 | 14 | 149 | RALAHGVRV | 0.0001 | | | | |
| 100 | 14 | 149 | RALAHGVRVL | | | | | |
| 86 | 12 | 2733 | RASGVLTT | | | | | |
| 79 | 11 | 43 | RLGVRATRKT | | | | | |
| 79 | 11 | 2918 | RLHGLSAFSL | 0.0280 | 0.0055 | 0.0160 | 0.0002 | 0.0032 |
| 79 | 11 | 2611 | RLIVFPDL | | | | | |
| 79 | 11 | 2611 | RLIVFPDLGV | 0.0890 | 0.0110 | 1.0000 | 0.0100 | 0.0050 |
| 79 | 11 | 1618 | RLKPTLHGPT | | | | | |
| 86 | 12 | 1029 | RLLAPITA | | | | | |
| 86 | 12 | 1347 | RLVVLATA | | | | | |
| 86 | 12 | 1347 | RLVVLATAT | | | | | |
| 100 | 14 | 519 | RLWHYPCT | | | | | |
| 86 | 12 | 317 | RMAWDMMM | | | | | |
| 93 | 13 | 635 | RMYVGGVEHRL | | | | | |
| 86 | 12 | 2243 | RQEMGGNI | | | | | |
| 86 | 12 | 2243 | RQEMGGNIT | | | | | |
| 86 | 12 | 2243 | RQEMGGNITRV | | | | | |
| 79 | 11 | 1284 | RTGVRTIT | | | | | |
| 79 | 11 | 1284 | RTGVRTITT | | | | | |
| 100 | 14 | 2621 | RVCEKMAL | | | | | |
| 86 | 12 | 2621 | RVCEKMALYDV | | | | | |
| 86 | 12 | 2252 | RVESENKV | | | | | |
| 86 | 12 | 2252 | RVESENKVV | 0.0001 | | | | |
| 79 | 11 | 2100 | RVGDFHYV | | | | | |
| 86 | 12 | 156 | RVLEDGVNYA | | | | | |
| 86 | 12 | 156 | RVLEDGVNYAT | | | | | |
| 88 | 12 | 2833 | RVYYLTRDPT | | | | | |
| 79 | 11 | 1655 | SADLEVVT | | | | | |
| 79 | 11 | 1655 | SADLEVVTST | | | | | |
| 79 | 11 | 2212 | SAPSLKAT | | | | | |
| 79 | 11 | 2212 | SAPSLKATCT | | | | | |
| 93 | 13 | 2207 | SASQLSAPSL | | | | | |
| 100 | 14 | 175 | SIFLLALL | | | | | |
| 86 | 12 | 175 | SIFLLALLSCL | | | | | |
| 100 | 14 | 1470 | SLDPTFTI | | | | | |
| 86 | 12 | 1470 | SLDPTFTIET | | | | | |
| 79 | 11 | 1470 | SLDPTFTIETT | | | | | |
| 79 | 11 | 2926 | SLHSYSPGEI | 0.0008 | | | | |
| 86 | 12 | 1051 | SLTGRDKNQV | 0.0002 | | | | |
| 100 | 14 | 2178 | SMLTDPSHI | 0.0053 | | | | |
| 100 | 14 | 2178 | SMLTDPSHIT | | | | | |
| 100 | 14 | 2178 | SMLTDPSHITA | | | | | |
| 86 | 12 | 2163 | SQLPCEPEPDV | | | | | |
| 93 | 13 | 2209 | SQLSAPSL | | | | | |
| 79 | 11 | 2209 | SQLSAPSLKA | | | | | |
| 79 | 11 | 2209 | SQLSAPSLKAT | | | | | |
| 93 | 13 | 56 | SQPRGRRQPI | | | | | |
| 86 | 12 | 1242 | STKVPAAYA | | | | | |
| 79 | 11 | 1242 | STKVPAAYAA | | | | | |
| 100 | 14 | 1784 | STLPGNPA | | | | | |
| 79 | 11 | 1784 | STLPGNPAI | 0.0007 | | | | |
| 79 | 11 | 2 | STNPKPQRKT | | | | | |
| 86 | 12 | 1663 | STWVLVGGV | | | | | |
| 86 | 12 | 1663 | STWVLVGGVL | | | | | |
| 86 | 12 | 1663 | STWVLVGGVLA | | | | | |
| 86 | 12 | 1299 | STYGKFLA | | | | | |
| 100 | 14 | 1262 | SVAATLGFGA | | | | | |
| 86 | 12 | 1455 | SVIDCNTCV | 0.0088 | | | | |
| 86 | 12 | 1455 | SVIDCNTCVT | | | | | |
| 86 | 12 | 995 | TAACGDII | | | | | |
| 86 | 12 | 1343 | TAGARLVV | | | | | |
| 86 | 12 | 1343 | TAGARLVVL | | | | | |
| 86 | 12 | 1343 | TAGARLVVLA | | | | | |
| 79 | 11 | 1343 | TAGARLVVLAT | | | | | |
| 79 | 11 | 2852 | TARHTPVNSWL | | | | | |
| 79 | 11 | 2590 | TIMAKNEV | | | | | |
| 93 | 13 | 1266 | TLGFGAYM | | | | | |
| 86 | 12 | 1266 | TLGFGAYMSKA | | | | | |
| 79 | 11 | 1622 | TLHGPTPL | | | | | |
| 79 | 11 | 1622 | TLHGPTPLL | 0.0070 | | | | |
| 86 | 12 | 1811 | TLLFNILGGWV | | | | | |
| 79 | 11 | 686 | TLPALSTGL | 0.0003 | | | | |
| 79 | 11 | 686 | TLPALSTGLI | 0.0004 | | | | |
| 79 | 11 | 1765 | TLPGNPAI | | | | | |
| 86 | 12 | 125 | TLTCGFADL | 0.0003 | | | | |
| 86 | 12 | 125 | TLTCGFADLM | | | | | |
| 79 | 11 | 2871 | TLWARMIL | | | | | |
| 79 | 11 | 2871 | TLWARMILM | | | | | |
| 79 | 11 | 2871 | TLWARMILMT | | | | | |
| 86 | 12 | 1209 | TMRSPVFT | | | | | |
| 86 | 12 | 1484 | TQTVDFSL | | | | | |
| 86 | 12 | 1484 | TQTVDFSLDPT | | | | | |
| 79 | 11 | 2589 | TTIMAKNEV | | | | | |
| 79 | 11 | 685 | TTLPALST | | | | | |
| 79 | 11 | 685 | TTLPALSTGL | | | | | |
| 79 | 11 | 685 | TTLPALSTGLI | | | | | |
| 86 | 12 | 1206 | TTMRSPVFT | | | | | |
| 79 | 11 | 2739 | TTSCGNTL | | | | | |
| 79 | 11 | 2739 | TTSCGNTLT | | | | | |
| 79 | 11 | 1597 | TVCARAQA | | | | | |
| 86 | 12 | 1466 | TVDFSLDPT | | | | | |
| 86 | 12 | 1466 | TVDFSLDPTFT | | | | | |
| 100 | 14 | 1336 | TVLDQAET | | | | | |
| 100 | 14 | 1336 | TVLDQAETA | | | | | |
| 86 | 12 | 1336 | TVLDQAETAGA | | | | | |
| 100 | 14 | 1263 | VAATLGFGA | | | | | |
| 93 | 13 | 1263 | VAATLGFGAYM | | | | | |
| 86 | 12 | 1230 | VAHLHAPT | | | | | |
| 86 | 12 | 1440 | VATDALMT | | | | | |
| 86 | 12 | 1592 | VAYQATVCA | 0.0005 | | | | |
| 79 | 11 | 1592 | VAYQATVCARA | | | | | |
| 100 | 14 | 1420 | VAYYRGLDV | 0.0001 | | | | |
| 100 | 14 | 1420 | VAYYRGLDVSV | | | | | |
| 86 | 12 | 1456 | VIDCNTCV | | | | | |
| 86 | 12 | 1456 | VIDCNTCVT | | | | | |
| 86 | 12 | 1456 | VIDCNTCVTQT | | | | | |
| 86 | 12 | 122 | VIDTLTCGFA | | | | | |
| 86 | 12 | 1671 | VLAALAAYCL | 0.0500 | 0.0087 | 0.0047 | 0.0002 | 0.0550 |
| 93 | 13 | 1521 | VLCECYDA | | | | | |
| 79 | 11 | 1521 | VLCECYDAGCA | | | | | |
| 100 | 14 | 1337 | VLDQAETA | | | | | |
| 86 | 12 | 1337 | VLDQAETAGA | | | | | |
| 86 | 12 | 157 | VLEDGVNYA | | | | | |
| 86 | 12 | 157 | VLEDGVNYAT | | | | | |
| 100 | 14 | 1258 | VLNPSVAA | | | | | |
| 100 | 14 | 1258 | VLNPSVAAT | | | | | |
| 100 | 14 | 1258 | VLNPSVAATL | 0.0015 | | | | |
| 79 | 11 | 2737 | VLTTSCGNT | | | | | |
| 79 | 11 | 2737 | VLTTSCGNTL | 0.0002 | | | | |
| 79 | 11 | 2737 | VLTTSCGNTLT | | | | | |
| 79 | 11 | 1852 | VLVDILAGYGA | | | | | |
| 86 | 12 | 1666 | VLVGGVLA | | | | | |
| 86 | 12 | 1666 | VLVGGVLAA | 0.0270 | 0.0130 | 0.3100 | 0.0120 | 0.0130 |
| 86 | 12 | 1666 | VLVGGVLAAL | 0.0084 | | | | |
| 86 | 12 | 1666 | VLVGGVLAALA | | | | | |
| 100 | 14 | 1256 | VLVLNPSV | | | | | |
| 100 | 14 | 1256 | VLVLNPSVA | 0.0009 | | | | |
| 100 | 14 | 1256 | VLVLNPSVAA | | | | | |
| 100 | 14 | 1256 | VLVLNPSVAAT | | | | | |
| 79 | 11 | 2600 | VQPEKGGRKPA | | | | | |
| 100 | 14 | 1918 | VQWMNRLI | | | | | |
| 100 | 14 | 1918 | VQWMNRLIA | | | | | |
| 100 | 14 | 1918 | VQWMNRLIAFA | | | | | |
| 86 | 12 | 1463 | VTQTVDFSL | | | | | |
| 79 | 11 | 1138 | VTRHADVI | | | | | |
| 79 | 11 | 1138 | VTRHADVIPV | | | | | |
| 86 | 12 | 1661 | VTSTWVLV | | | | | |
| 86 | 12 | 1661 | VTSTWVLVGGV | | | | | |
| 79 | 11 | 1439 | VVATDALM | | | | | |
| 79 | 11 | 1439 | VVATDALMT | | | | | |
| 79 | 11 | 1901 | VVCAAILRRHV | | | | | |
| 79 | 11 | 1898 | VVGVVCAA | | | | | |
| 79 | 11 | 1898 | VVGVVCAAI | | | | | |
| 79 | 11 | 1898 | VVGVVCAAIL | | | | | |
| 86 | 12 | 1660 | VVTSTWVL | | | | | |
| 86 | 12 | 1660 | VVTSTWVLV | 0.0003 | | | | |
| 86 | 12 | 1766 | WAKHMWNFI | 0.0001 | | | | |
| 86 | 12 | 76 | WAQPGYPWPL | | | | | |
| 86 | 12 | 2873 | WARMILMT | | | | | |
| 79 | 11 | 2297 | WARPDYNPPL | | | | | |
| 100 | 14 | 1920 | WMNRLIAFA | 0.0410 | 0.0330 | 3.0000 | 0.0023 | 0.1000 |
| 79 | 11 | 557 | WMNSTGFT | | | | | |
| 86 | 12 | 1665 | WVLVGGVL | | | | | |
| 86 | 12 | 1665 | WVLVGGVLA | 0.0005 | | | | |
| 86 | 12 | 1665 | WVLVGGVLAA | 0.0015 | | | | |
| 86 | 12 | 1665 | WVLVGGVLAAL | | | | | |
| 79 | 11 | 1249 | YAAQGYKV | | | | | |
| 79 | 11 | 1249 | YAAQGYKVL | | | | | |
| 79 | 11 | 1249 | YAAQGYKVLV | | | | | |
| 79 | 11 | 1249 | YAAQGYKVLVL | | | | | |
| 79 | 11 | 136 | YIPLVGAPL | 0.0050 | | | | |
| 100 | 14 | 1779 | YLAGLSTL | | | | | |
| 86 | 12 | 1165 | YLKGSSGGPL | 0.0002 | | | | |
| 86 | 12 | 1165 | YLKGSSGGPLL | | | | | |
| 93 | 13 | 35 | YLLPRRCPRL | 0.0400 | 0.0007 | 0.0220 | 0.0089 | 0.0039 |
| 79 | 11 | 2836 | YLTRDPTT | | | | | |
| 86 | 12 | 1590 | YLVAYQAT | | | | | |
| 86 | 12 | 1590 | YLVAYQATV | 0.2500 | 0.1100 | 0.6300 | 0.0450 | 1.2000 |
| 86 | 12 | 1590 | YLVAYQATVCA | | | | | |
| 86 | 12 | 1138 | YLVTRHADV | 0.0110 | 0.0021 | 2.8000 | 0.0520 | 0.0130 |
| 79 | 11 | 1136 | YLVTRHADVI | | | | | |
| 93 | 13 | 1594 | YQATVCARA | | | | | |
| 79 | 11 | 1594 | YQATVCARAQA | | | | | |
| 79 | 11 | 1106 | YTNVDQDL | | | | | |
| 79 | 11 | 1106 | YTNVDQDLV | | | | | |
| 86 | 12 | 276 | YVGDLCGSV | 0.0018 | | | | |
| 86 | 12 | 276 | YVGDLCGSVFL | | | | | |
| 93 | 13 | 637 | YVGGVEHRL | 0.0008 | | | | |
| 86 | 12 | 1939 | YVPESDAA | | | | | |
| 86 | 12 | 1939 | YVPESDAAA | | | | | |
| 86 | 12 | 1939 | YVPESDAAARV | | | | | |
| | | | 555 | | | | | |

TABLE IX
HCV A03 Super Motif (With Binding Information)

| | | | | | | | | |
|---|---|---|---|---|---|---|---|---|
| Conservancy | Freq. | Position | Sequence | A*0301 | A*1101 | A*3101 | A*3301 | A*6801 |

| | | | | | | | | |
|---|---|---|---|---|---|---|---|---|
| 86 | 12 | 647 | AACNWTRGER | 0.0003 | 0.0140 | 0.0450 | 0.0055 | 0.0018 |
| 79 | 11 | 147 | AARALAHGVR | | | | | |
| 79 | 11 | 1187 | AAVCTRGVAK | | | | | |
| 79 | 11 | 2208 | ASQLSAPSLK | | | | | |
| 86 | 12 | 1265 | ATLGFGAYMSK | | | | | |
| 79 | 11 | 48 | ATRKTSER | | | | | |
| 79 | 11 | 1188 | AVCTRGVAK | 0.0260 | 0.0250 | 0.0011 | 0.0004 | 0.0001 |
| 86 | 12 | 2941 | CLRKLGVPPLR | | | | | |
| 79 | 11 | 555 | CTWMNSTGFTK | 0.7600 | 0.7500 | | | |
| 79 | 11 | 2599 | CVQPEKGGR | 0.0008 | 0.0005 | | | |
| 79 | 11 | 2599 | CVQPEKGGRK | 0.0011 | 0.0008 | | | |
| 100 | 14 | 1574 | DAHFLSQTK | 0.0003 | 0.0005 | | | |
| 93 | 13 | 2617 | DLGVRVCEK | 0.0003 | 0.0002 | 0.0006 | 0.0440 | 0.0002 |
| 79 | 11 | 1143 | DVIPVRRR | | | | | |
| 86 | 12 | 2245 | EMGGNITR | | | | | |
| 86 | 12 | 2596 | EVFCVQPEK | 0.0008 | 0.0270 | 0.0003 | 0.0005 | 0.4500 |
| 100 | 14 | 728 | FLLLADAR | | | | | |
| 79 | 11 | 146 | GAARALAHGVR | | | | | |
| 100 | 14 | 1916 | GAVQWMNR | | | | | |
| 79 | 11 | 3037 | GIYLLPNR | | | | | |
| 79 | 11 | 1004 | GLPVSARR | | | | | |
| 86 | 12 | 1131 | GSSDLYLVTR | | | | | |
| 86 | 12 | 1863 | GVAGALVAFK | 0.3900 | 1.4000 | 0.0055 | 0.0011 | 0.0680 |
| 79 | 11 | 3035 | GVGIYLLPNR | 0.0014 | 0.0140 | 0.1500 | 0.0130 | 0.0007 |
| 79 | 11 | 45 | GVRATRKTSER | | | | | |
| 79 | 11 | 1900 | GVVCAAILR | | | | | |
| 79 | 11 | 1900 | GVVCAAILRR | | | | | |
| 93 | 13 | 33 | GVYLLPRR | | | | | |
| 93 | 13 | 33 | GVYLLPRRGPR | | | | | |
| 79 | 11 | 1141 | HADVIPVR | | | | | |
| 79 | 11 | 1141 | HADVIPVRR | | | | | |
| 79 | 11 | 1141 | HADVIPVRRR | | | | | |
| 100 | 14 | 1234 | HAPTGSGK | | | | | |
| 93 | 13 | 1234 | HAPTGSGKSTK | | | | | |
| 100 | 14 | 1572 | HIDAHFLSQTK | | | | | |
| 86 | 12 | 1232 | HLHAPTGSGK | 0.5900 | 0.0024 | 0.0005 | 0.0006 | 0.0028 |
| 100 | 14 | 1395 | HLIFCHSK | | | | | |
| 100 | 14 | 1395 | HLIFCHSKK | 0.0250 | 0.0006 | 0.0003 | 0.0004 | 0.0010 |
| 100 | 14 | 1395 | HLIFCHSKKK | 0.0260 | 0.0002 | 0.0009 | 0.0006 | 0.0001 |
| 79 | 11 | 2928 | HSYSPGEINR | | | | | |
| 79 | 11 | 222 | HTPGCVPCVR | 0.0004 | 0.0012 | | | |
| 86 | 12 | 2250 | ITRVESENK | 0.0150 | 0.0079 | 0.0007 | 0.0006 | 0.0092 |
| 86 | 12 | 1296 | ITYSTYGK | | | | | |
| 79 | 11 | 2613 | IVFPDLGVR | 0.0036 | 0.0044 | | | |
| 93 | 13 | 30 | IVGGVYLLPR | 0.0008 | 0.0056 | | | |
| 93 | 13 | 30 | IVGGVYLLPRR | | | | | |
| 86 | 12 | 2944 | KLGVPPLR | | | | | |
| 86 | 12 | 10 | KTKRNTNR | | | | | |
| 86 | 12 | 10 | KTKRNTNRR | 0.0110 | 0.0100 | | | |
| 93 | 13 | 51 | KTSERSQPR | 0.1600 | 0.0640 | 0.2700 | 0.0160 | 0.0550 |
| 86 | 12 | 51 | KTSERSQPRGR | | | | | |
| 86 | 12 | 1729 | LAEQFKQK | | | | | |
| 86 | 12 | 2235 | LIEANLLWR | 0.0008 | 0.0005 | 0.0018 | 0.0069 | 0.0008 |
| 100 | 14 | 1396 | LIFCHSKK | | | | | |
| 100 | 14 | 1396 | LIFCHSKKK | 0.5400 | 0.1900 | 0.0071 | 0.0012 | 0.0240 |
| 79 | 11 | 2612 | LIVFPDLGVR | 0.0003 | 0.0001 | | | |
| 100 | 14 | 726 | LLFLLLADAR | | | | | |
| 93 | 13 | 36 | LLPRRGPR | | | | | |
| 86 | 12 | 97 | LLSPRGSR | | | | | |
| 79 | 11 | 1591 | LVAYQATVCAR | | | | | |
| 79 | 11 | 1 | MSTNPKPQR | | | | | |
| 79 | 11 | 1 | MSTNPKPQRK | | | | | |
| 86 | 12 | 2249 | NITRVESENK | 0.0010 | 0.0062 | | | |
| 79 | 11 | 14 | NTNRRPQDVK | 0.0010 | 0.0007 | | | |
| 79 | 11 | 1295 | PITYSTYGK | | | | | |
| 79 | 11 | 2667 | PMGFSYDTR | | | | | |
| 93 | 13 | 514 | PSPVVVGTTDR | | | | | |
| 79 | 11 | 1607 | PSWDQMWK | | | | | |
| 86 | 12 | 109 | PTDPRRRSR | 0.0008 | 0.0005 | | | |
| 93 | 13 | 1236 | PTGSGKSTK | 0.0002 | 0.0001 | 0.0008 | 0.0006 | 0.0002 |
| 93 | 13 | 516 | PVVVGTTDR | 0.0008 | 0.0005 | | | |
| 86 | 12 | 1340 | QAETAGAR | | | | | |
| 93 | 13 | 29 | QIVGGVYLLPR | | | | | |
| 86 | 12 | 289 | QLFTFSPR | | | | | |
| 79 | 11 | 289 | QLFTFSPRR | 0.7500 | 0.0330 | 0.0290 | 0.0077 | 3.1000 |
| 79 | 11 | 2210 | QLSAPSLK | | | | | |
| 79 | 11 | 1186 | RAAVCTRGVAK | | | | | |
| 100 | 14 | 149 | RALAHGVR | | | | | |
| 79 | 11 | 47 | RATRKTSER | | | | | |
| 79 | 11 | 43 | RLGVRATR | | | | | |
| 79 | 11 | 43 | RLGVRATRK | 0.9400 | 0.0290 | 0.0420 | 0.0004 | 0.0001 |
| 100 | 14 | 1923 | RLIAFASR | | | | | |
| 79 | 11 | 2611 | RLIVFPDLGVR | | | | | |
| 100 | 14 | 635 | RMYVGGVEHR | 0.7200 | 0.0200 | 0.1900 | 0.0030 | 0.0045 |
| 93 | 13 | 55 | RSQPRGRR | | | | | |
| 79 | 11 | 2207 | SASQLSAPSLK | 0.0003 | 0.0044 | | | |
| 86 | 12 | 1132 | SSDLYLVTR | | | | | |
| 79 | 11 | 2 | STNPKPQR | | | | | |
| 79 | 11 | 2 | STNPKPQRK | | | | | |
| 79 | 11 | 2 | STNPKPQRKTK | | | | | |
| 86 | 12 | 1266 | TLGFGAYMSK | 0.0810 | 0.0610 | 0.0005 | 0.0013 | 0.0009 |
| 79 | 11 | 1622 | TLHGPTPLLYR | | | | | |
| 93 | 13 | 52 | TSERSQPR | | | | | |
| 86 | 12 | 52 | TSERSQPRGR | 0.0003 | 0.0001 | | | |
| 86 | 12 | 52 | TSERSQPRGRR | | | | | |
| 86 | 12 | 1050 | TSLTGRDK | | | | | |
| 86 | 12 | 1864 | VAGALVAFK | 0.2400 | 0.8900 | 0.0048 | 0.0025 | 0.0310 |
| 79 | 11 | 1592 | VAYQATVCAR | 0.0005 | 0.0036 | 0.0680 | 0.0720 | 0.0280 |
| 86 | 12 | 1337 | VLDQAETAGAR | | | | | |
| 79 | 11 | 1138 | VTRHADVIPVR | | | | | |
| 79 | 11 | 1901 | VVCAAILR | | | | | |
| 79 | 11 | 1901 | VVCAAILRR | | | | | |
| 79 | 11 | 1898 | VVGVVCAAILR | | | | | |
| 93 | 13 | 517 | VVVGTTDR | | | | | |
| 86 | 12 | 93 | WAGWLLSPR | | | | | |
| 86 | 12 | 96 | WLLSPRGSR | 0.0008 | 0.0005 | | | |
| 100 | 14 | 1920 | WMNRLIAFASR | | | | | |
| 79 | 11 | 557 | WMNSTGFTK | 0.0530 | 0.0810 | 0.0014 | 0.0420 | 0.0056 |
| 93 | 13 | 35 | YLLPRRGPR | 0.0054 | 0.0005 | | | |
| 79 | 11 | 2930 | YSPGEINR | | | | | |
| 100 | 14 | 637 | YVGGVEHR | | | | | |
| 86 | 12 | 1939 | YVPESDAAAR | 0.0003 | 0.0001 | | | |
| | | | 112 | | | | | |

TABLE X
HCV A24 Super Motif With Binding Information

| | | No. of | | Con- | |
|---|---|---|---|---|---|
| | | Amino | Sequence | servancy | |
| Sequence | Position | Acids | Frequency | (%) | A*2401 |
| AILSPGAL | 1890 | 8 | 13 | 93 | |
| ALAHGVRVL | 150 | 9 | 14 | 100 | |
| ALSTGLIHL | 689 | 9 | 12 | 86 | |
| ALVVGVVCAAI | 1896 | 11 | 11 | 79 | |
| ATGNLPGCSF | 165 | 10 | 13 | 93 | |
| ATLGFGAY | 1265 | 8 | 14 | 100 | |
| ATLGFGAYM | 1265 | 9 | 13 | 93 | |
| AVAYYRGL | 1419 | 8 | 14 | 100 | |
| AVQWMNRL | 1917 | 8 | 14 | 100 | |
| AVQWMNRLI | 1917 | 9 | 14 | 100 | |
| AVQWMNRLIAF | 1917 | 11 | 14 | 100 | |
| AWDMMMNW | 319 | 8 | 12 | 86 | |
| AYAAQGYKVL | 1248 | 10 | 11 | 79 | 0.0009 |
| AYYRGLDVSVI | 1421 | 11 | 14 | 100 | |
| CLRKLGVPPL | 2941 | 10 | 12 | 86 | |
| CLWMMLLI | 739 | 8 | 12 | 86 | |
| CTCGSSDL | 1128 | 8 | 11 | 79 | |
| CTCGSSDLY | 1128 | 9 | 11 | 79 | 0.0001 |
| CTCGSSDLYL | 1128 | 10 | 11 | 79 | |
| CTRGVAKAVDF | 1190 | 11 | 11 | 79 | |
| CTWMNSTGF | 555 | 9 | 11 | 79 | |
| CVTQTVDF | 1462 | 8 | 12 | 86 | |
| CVTQTVDFSL | 1462 | 10 | 12 | 86 | |
| CYDAGCAW | 1525 | 8 | 11 | 79 | |
| CYDAGCAWY | 1525 | 9 | 11 | 79 | |
| CYDAGCAWYEL | 1525 | 11 | 11 | 79 | |
| DFSLDPTF | 1468 | 8 | 14 | 100 | |
| DFSLDPTFTI | 1468 | 10 | 14 | 100 | |
| DLCGSVFL | 279 | 8 | 12 | 86 | |
| DLEVVTSTW | 1657 | 9 | 12 | 86 | |
| DLEVVTSTWVL | 1657 | 11 | 12 | 86 | |
| DLGVRVCEKM | 2617 | 10 | 13 | 93 | |
| DLMGYIPL | 132 | 8 | 11 | 79 | |
| DLVNLLPAI | 1883 | 9 | 11 | 79 | |
| DLVNLLPAIL | 1883 | 10 | 11 | 79 | |
| DTAACGDI | 994 | 8 | 12 | 86 | |
| DTAACGDII | 994 | 9 | 12 | 86 | |
| DTLTCGFADL | 124 | 10 | 12 | 86 | |
| DTLTCGFADLM | 124 | 11 | 12 | 86 | |
| DVKFPGGGQI | 21 | 10 | 12 | 86 | |
| DYPYRLWHY | 615 | 9 | 14 | 100 | |
| EIPFYGKAI | 1377 | 9 | 13 | 93 | |
| ETAGARLVVL | 1342 | 10 | 12 | 86 | |
| ETTMRSPVF | 1207 | 9 | 12 | 86 | |
| EVVTSTWVL | 1659 | 9 | 12 | 86 | |
| FISGIQYL | 1773 | 8 | 14 | 100 | |
| FISGIQYLAGL | 1773 | 11 | 14 | 100 | |
| FLLALLSCL | 177 | 9 | 12 | 86 | |
| FTEAMTRY | 2792 | 8 | 14 | 100 | |
| FTGLTHIDAHF | 1567 | 11 | 13 | 93 | |
| FTTLPALSTGL | 684 | 11 | 11 | 79 | |
| FWAKHMWNF | 1765 | 9 | 12 | 86 | 6.9000 |
| FWAKHMWNFI | 1765 | 10 | 12 | 86 | |
| GFADLMGY | 129 | 8 | 13 | 93 | |
| GFADLMGYI | 129 | 9 | 13 | 93 | |
| GFADLMGYIPL | 129 | 11 | 11 | 79 | |
| GFSYDTRCF | 2669 | 9 | 11 | 79 | |
| GIQYLAGL | 1776 | 8 | 14 | 100 | |
| GIQYLAGLSTL | 1776 | 11 | 14 | 100 | |
| GLPVCQDHL | 1552 | 9 | 13 | 93 | |
| GLPVCQDHLEF | 1552 | 11 | 12 | 86 | |
| GLSAFSLHSY | 2921 | 10 | 11 | 79 | 0.0001 |
| GLSTLPGNPAI | 1782 | 11 | 11 | 79 | |
| GLTHIDAHF | 1569 | 9 | 13 | 93 | |
| GLTHIDAHFL | 1569 | 10 | 13 | 93 | |
| GTFPINAY | 2063 | 8 | 11 | 79 | |
| GVAGALVAF | 1863 | 9 | 12 | 86 | |
| GVAKAVDF | 1193 | 8 | 11 | 79 | |
| GVLAALAAY | 1670 | 9 | 12 | 86 | |
| GVLAALAAYCL | 1670 | 11 | 12 | 86 | |
| GVNYATGNL | 161 | 9 | 11 | 79 | |
| GVRVCEKM | 2619 | 8 | 14 | 100 | |
| GVRVCEKMAL | 2619 | 10 | 14 | 100 | |
| GVRVCEKMALY | 2619 | 11 | 14 | 100 | |
| GVRVLEDGVNY | 154 | 11 | 12 | 86 | |
| GVVCAAIL | 1900 | 8 | 11 | 79 | |
| GWRLLAPI | 1027 | 8 | 11 | 79 | |
| GWRLLAPITAY | 1027 | 11 | 11 | 79 | |
| GYGAGVAGAL | 1859 | 10 | 12 | 86 | 0.0003 |
| GYIPLVGAPL | 135 | 10 | 11 | 79 | 0.0057 |
| GYRRCRASGVL | 2728 | 11 | 12 | 86 | |
| HLHQNIVDVQY | 696 | 11 | 11 | 79 | |
| HLPYIEQGM | 1719 | 9 | 11 | 79 | |
| HMWNFISGI | 1769 | 9 | 13 | 93 | |
| HMWNFISGIQY | 1769 | 11 | 13 | 93 | |
| HTPVNSWL | 2855 | 8 | 12 | 86 | |
| HTPVNSWLGNI | 2855 | 11 | 12 | 86 | |
| HYGPGEGAVQW | 1910 | 11 | 11 | 79 | |
| IFLLALLSCL | 176 | 10 | 12 | 86 | |
| ILGGWVAAQL | 1816 | 10 | 12 | 86 | 0.0026 |
| ILGIGTVL | 1331 | 8 | 12 | 86 | |
| IMAKNEVF | 2591 | 8 | 12 | 86 | |
| ITYSTYGKF | 1296 | 9 | 12 | 86 | |
| ITYSTYGKFL | 1296 | 10 | 11 | 79 | |
| IVDVQYLY | 701 | 8 | 12 | 86 | |
| IVGGVYLL | 30 | 8 | 13 | 93 | |
| KFPGGGQI | 23 | 8 | 13 | 93 | |
| KVIDTLTCGF | 121 | 10 | 12 | 86 | |
| LFNILGGW | 1813 | 8 | 12 | 86 | |
| LIEANLLW | 2235 | 8 | 12 | 86 | |
| LINTNGSW | 414 | 8 | 11 | 79 | |
| LLALLSCL | 178 | 8 | 12 | 86 | |
| LLAPITAY | 1030 | 8 | 14 | 100 | |
| LLFNILGGW | 1812 | 9 | 12 | 86 | |
| LLPAILSPGAL | 1887 | 11 | 13 | 93 | |
| LLPRRGPRL | 36 | 9 | 13 | 93 | |
| LLSPRGSRPSW | 97 | 11 | 11 | 79 | |
| LLWRQEMGGNI | 2240 | 11 | 12 | 86 | |
| LTCGFADL | 126 | 8 | 12 | 86 | |
| LTCGFADLM | 126 | 9 | 12 | 86 | |
| LTCGFADLMGY | 126 | 11 | 12 | 86 | |
| LTHIDAHF | 1570 | 8 | 13 | 93 | |
| LTHIDAHFL | 1570 | 9 | 13 | 93 | |
| LTSMLTDPSHI | 2176 | 11 | 13 | 93 | |
| LTTSCGNTL | 2738 | 9 | 11 | 79 | |
| LVDILAGY | 1853 | 8 | 11 | 79 | |
| LVGGVLAAL | 1667 | 9 | 12 | 86 | |
| LVLNPSVAATL | 1257 | 11 | 14 | 100 | |
| LVNLLPAI | 1884 | 8 | 11 | 79 | |
| LVNLLPAIL | 1884 | 9 | 11 | 79 | |
| LVTRHADVI | 1137 | 9 | 11 | 79 | |
| LVVGVVCAAI | 1897 | 10 | 11 | 79 | |
| LVVGVVCAAIL | 1897 | 11 | 11 | 79 | |
| LWARMILM | 2872 | 8 | 12 | 86 | |
| LWARMILMTHF | 2872 | 11 | 12 | 86 | |
| LWRCEMGGNI | 2241 | 10 | 12 | 86 | |
| LYLVTRHADVI | 1135 | 11 | 11 | 79 | |
| MILMTHFF | 2876 | 8 | 12 | 86 | |
| MLTDPSHI | 2179 | 8 | 14 | 100 | |
| MWNFISGI | 1770 | 8 | 14 | 100 | |
| MWNFISGIQY | 1770 | 10 | 14 | 100 | |
| MWNFISGIQYL | 1770 | 11 | 14 | 100 | |
| MYVGGVEHRL | 636 | 10 | 13 | 93 | 0.0270 |
| NFISGIQY | 1772 | 8 | 14 | 100 | |
| NFISGIQYL | 1772 | 9 | 14 | 100 | 0.0170 |
| NILGGWVAACL | 1815 | 11 | 12 | 86 | |
| NIRTGVRTI | 1282 | 9 | 11 | 79 | |
| NIVDVQYL | 700 | 8 | 12 | 86 | |
| NIVDVQYLY | 700 | 9 | 12 | 86 | 0.0001 |
| NLGKVIDTL | 118 | 9 | 12 | 86 | |
| NLLWRQEM | 2239 | 8 | 12 | 86 | |
| NLPGCSFSI | 168 | 9 | 13 | 93 | |
| NLPGCSFSIF | 168 | 10 | 13 | 93 | |
| NLPGCSFSIFL | 168 | 11 | 13 | 93 | |
| NTCVTQTVDF | 1460 | 10 | 12 | 86 | |
| NTNGSWHI | 416 | 8 | 13 | 93 | |
| NTNRRPQDVKF | 14 | 11 | 11 | 79 | |
| NVQDLVGW | 1108 | 9 | 11 | 79 | |
| NWFGCTWM | 561 | 8 | 12 | 86 | |
| PITYSTYGKF | 1295 | 10 | 11 | 79 | |
| PITYSTYGKFL | 1295 | 11 | 11 | 79 | |
| PLEGEPGDPDL | 2403 | 11 | 13 | 93 | |
| PLGGAARAL | 143 | 9 | 11 | 79 | |
| PMGFSYDTRCF | 2667 | 11 | 11 | 79 | |
| PTDPRRRSRNL | 109 | 11 | 12 | 86 | |
| PTLHGPTPL | 1621 | 9 | 11 | 79 | |
| PTLHGPTPLL | 1621 | 10 | 11 | 79 | |
| PTLHGPTPLLY | 1621 | 11 | 11 | 79 | |
| PTLWARMI | 2870 | 8 | 11 | 79 | |
| PTLWARMIL | 2870 | 9 | 11 | 79 | |
| PTLWARMILM | 2870 | 10 | 11 | 79 | |
| PTPLLYRL | 1626 | 8 | 14 | 100 | |
| PVCQDHIEF | 1554 | 9 | 12 | 86 | |
| PVCQDHLEFW | 1554 | 10 | 12 | 86 | |
| PVNSWLGNI | 2857 | 8 | 14 | 100 | |
| PVNSWLGNII | 2857 | 10 | 14 | 100 | |
| PVNSWLGNIIM | 2857 | 11 | 12 | 86 | |
| PVVHGCPL | 2318 | 8 | 11 | 79 | |
| QFKQKALGL | 1732 | 9 | 12 | 86 | |
| QFKQKALGLL | 1732 | 10 | 12 | 86 | |
| QIVGGVYL | 29 | 8 | 13 | 93 | |
| QIVGGVYLL | 29 | 9 | 13 | 93 | |
| QTVDFSLDPTF | 1465 | 11 | 12 | 86 | |
| QWMNRLIAF | 1919 | 9 | 14 | 100 | |
| QYLAGLSTL | 1778 | 9 | 14 | 100 | 0.0480 |
| QYSPGQRVEF | 2647 | 10 | 11 | 79 | 0.0180 |
| QYSPGCRVEFL | 2647 | 11 | 11 | 79 | |
| RLHGLSAF | 2918 | 8 | 12 | 86 | |
| RLHGLSAFSL | 2918 | 10 | 11 | 79 | 0.0001 |
| RLIVFPDL | 2611 | 8 | 11 | 79 | |
| RLLAPITAY | 1029 | 9 | 12 | 86 | |
| RMAWDMMM | 317 | 8 | 12 | 86 | |
| RMAWDMMMNW | 317 | 10 | 12 | 86 | |
| RMILMTHF | 2875 | 8 | 12 | 86 | |
| RMILMTHFF | 2875 | 9 | 12 | 86 | |
| RMYVGGVEHRL | 635 | 11 | 13 | 93 | |
| RVCEKMAL | 2621 | 8 | 14 | 100 | |
| RVCEKMALY | 2621 | 9 | 14 | 100 | |
| RVLEDGVNY | 156 | 9 | 12 | 86 | |
| SFSIFLLAL | 173 | 9 | 14 | 100 | |
| SFSIFLLALL | 173 | 10 | 14 | 100 | 0.0041 |
| SIFLLALL | 175 | 8 | 14 | 100 | |
| SIFLLALLSCL | 175 | 11 | 12 | 86 | |
| SLDPTFTI | 1470 | 8 | 14 | 100 | |
| SLHSYSPGEI | 2928 | 10 | 11 | 79 | |
| SMLTDPSHI | 2178 | 9 | 14 | 100 | |
| STKVPAAY | 1242 | 8 | 12 | 86 | |
| STLPGNPAI | 1784 | 9 | 11 | 79 | |
| STWVLVGGVL | 1663 | 10 | 12 | 86 | |
| SVAATLGF | 1262 | 8 | 14 | 100 | |
| SVAATLGFGAY | 1262 | 11 | 14 | 100 | |
| SWDQMWKCL | 1608 | 9 | 11 | 79 | |
| SWLGNIIM | 2860 | 8 | 12 | 86 | |
| SYLKGSSGGPL | 1164 | 11 | 12 | 86 | |
| TIMAKNEVF | 2590 | 9 | 11 | 79 | |
| TLGFGAYM | 1266 | 8 | 13 | 93 | |
| TLHGPTPL | 1622 | 8 | 11 | 79 | |
| TLHGPTPLL | 1622 | 9 | 11 | 79 | |
| TLHGPTPLLY | 1622 | 10 | 11 | 19 | 0.0001 |
| TLLFNILGGW | 1811 | 10 | 12 | 86 | |
| TLPALSTGL | 686 | 9 | 11 | 79 | |
| TLPALSTGLI | 686 | 10 | 11 | 79 | |
| TLPGNPAI | 1785 | 8 | 11 | 79 | |
| TLTCGFADL | 125 | 9 | 12 | 86 | |
| TLTCGFADLM | 125 | 10 | 12 | 86 | |
| TLWARMIL | 2871 | 8 | 11 | 79 | |
| TLWARMILM | 2871 | 9 | 11 | 79 | |
| TTIMAKNEVF | 2589 | 10 | 11 | 79 | |
| TTLPALSTGL | 685 | 10 | 11 | 79 | |
| TTLPALSTGLI | 685 | 11 | 11 | 79 | |
| TTMRSPVF | 1208 | 8 | 12 | 86 | |
| TTSCGNTL | 2739 | 8 | 11 | 79 | |
| TVDFSLDPTF | 1466 | 10 | 12 | 86 | |
| TWMNSTGF | 556 | 8 | 11 | 79 | |
| TWVLVGGVL | 1664 | 9 | 12 | 86 | |
| TYSTYGKF | 1297 | 8 | 13 | 93 | |
| TYSTYGKFL | 1297 | 9 | 12 | 86 | 0.0230 |
| VFTGLTHI | 1566 | 8 | 13 | 93 | |
| VIDTLTCGF | 122 | 8 | 12 | 86 | |
| VLAALAAY | 1671 | 8 | 12 | 86 | |
| VLAALAAYCL | 1671 | 10 | 12 | 86 | 0.0070 |
| VLEDGVNY | 157 | 8 | 12 | 86 | |
| VLNPSVAATL | 1258 | 10 | 14 | 100 | |
| VLTTSCGNTL | 2737 | 10 | 11 | 79 | |
| VLVDILAGY | 1852 | 9 | 11 | 79 | |
| VLVGGVLAAL | 1668 | 10 | 12 | 86 | |
| VMGSSYGF | 2839 | 8 | 11 | 79 | |
| VMGSSYGFQV | 2639 | 10 | 11 | 79 | |
| VTQTVDFSL | 1463 | 9 | 12 | 86 | |
| VTRHADVI | 1138 | 8 | 11 | 79 | |
| VVATDALM | 1439 | 8 | 11 | 79 | |
| VVGVVCAAI | 1898 | 9 | 11 | 79 | |
| VVGVVCAAIL | 1898 | 10 | 11 | 79 | |
| VVTSTWVL | 1660 | 8 | 12 | 86 | |
| VYLLPRRGPRL | 34 | 11 | 13 | 93 | 0.0016 |
| WMNRLIAF | 1920 | 8 | 14 | 100 | |
| WVLVGGVL | 1665 | 8 | 12 | 86 | |
| WVLVGGVLAAL | 1865 | 11 | 12 | 86 | |
| YIPLVGAPL | 136 | 9 | 11 | 79 | |
| YLAGLSTL | 1779 | 8 | 14 | 100 | |
| YLKGSSGGPL | 1165 | 10 | 12 | 86 | |
| YLKGSSGGPLL | 1165 | 11 | 12 | 86 | |
| YLLPRRGPTRL | 35 | 10 | 13 | 93 | 0.0001 |
| YLVTRHADVI | 1136 | 10 | 11 | 79 | |
| YTNVDQDL | 1106 | 8 | 11 | 79 | |
| YTNVDQDLVGW | 1106 | 11 | 11 | 79 | |
| YVGDLCGSVF | 276 | 10 | 12 | 86 | |
| YVGDLCGSVFL | 276 | 11 | 12 | 86 | |
| YVGGVEHRL | 637 | 9 | 13 | 93 | |
| YYRGLDVSVI | 1422 | 10 | 14 | 100 | |
| 260 | | 3 | | | |

TABLE XI
HCV B07 Super Motif (with Binding Information)

| | | | | | | | | |
|---|---|---|---|---|---|---|---|---|
| Conservancy | Freq. | Position | Sequence | B*0702 | B*3501 | B*5101 | B*5301 | B*5401 |

| | | | | | | | | |
|---|---|---|---|---|---|---|---|---|
| 86 | 12 | 1604 | APPPSWDQM | 0.0028 | 0.0002 | 0.0002 | 0.0001 | 0.0002 |
| 79 | 11 | 1604 | APPPSWDQMW | 0.0001 | 0.0001 | 0.0002 | 0.0006 | 0.0003 |
| 93 | 13 | 1235 | APTGSGKSTKV | 0.0001 | | | | |
| 79 | 11 | 2869 | APTLWARM | 0.4300 | 0.0001 | 0.0012 | −0.0002 | 0.0023 |
| 79 | 11 | 2869 | APTLWARMI | 0.0160 | 0.0002 | 0.0012 | 0.0001 | 0.0002 |
| 79 | 11 | 2869 | APTLWARMIL | 0.8800 | 0.0001 | 0.0010 | 0.0001 | 0.0003 |
| 79 | 11 | 2869 | APTLWARMILM | 0.0130 | 0.0001 | −0.0003 | −0.0002 | 0.0033 |
| 79 | 11 | 2410 | DPDLSDGSW | 0.0001 | 0.0002 | 0.0002 | 0.0005 | 0.0002 |
| 86 | 12 | 111 | DPRRRSRNL | 0.0170 | 0.0002 | 0.0001 | 0.0001 | 0.0002 |
| 79 | 11 | 2615 | FPDLGVRV | 0.0001 | | | | |
| 100 | 14 | 24 | FPGGGQIV | 0.0001 | | | | |
| 100 | 14 | 24 | FPGGGQIVGGV | 0.0001 | | | | |
| 86 | 12 | 1912 | GPGEGAVQW | 0.0001 | 0.0002 | 0.0002 | 0.0001 | 0.0002 |
| 86 | 12 | 1912 | GPGEGAVQWM | 0.0001 | 0.0001 | 0.0002 | 0.0001 | 0.0003 |
| 93 | 13 | 41 | GPRLGVRA | 0.0001 | | | | |
| 100 | 14 | 1625 | GPTPLLYRL | 0.0024 | 0.0002 | 0.0002 | 0.0001 | 0.0002 |
| 93 | 13 | 1625 | GPTPLLYRLGA | 0.0005 | | | | |
| 93 | 13 | 507 | GPVYCFTPSPV | 0.0001 | | | | |
| 93 | 13 | 1378 | IPFYGKAI | 0.0120 | 0.0001 | 0.1200 | −0.0002 | 0.2000 |
| 79 | 11 | 137 | IPLVGAPL | 0.4400 | 0.0032 | 0.0700 | 0.0003 | 0.0035 |
| 86 | 12 | 2608 | KPARLIVF | 0.0150 | 0.0002 | 0.0017 | −0.0002 | 0.0006 |
| 79 | 11 | 2608 | KPARLIVFPDL | 0.0003 | | | | |
| 79 | 11 | 1620 | KPTLHGPTPL | 1.4150 | 0.0001 | 0.0002 | 0.0001 | 0.0003 |
| 79 | 11 | 1620 | KPTLHGPTPLL | 0.0021 | | | | |
| 93 | 13 | 1888 | LPAILSPGA | 0.0001 | 0.0001 | 0.0001 | 0.0002 | 0.9400 |
| 93 | 13 | 1888 | LPAILSPGAL | 0.0053 | 0.0001 | 0.0036 | 0.0001 | 0.2100 |
| 86 | 12 | 1888 | LPAILSPGALV | 0.0003 | | | | |
| 100 | 14 | 687 | LPALSTGL | 0.0020 | | | | |
| 86 | 12 | 687 | LPALSTGLI | 0.0350 | 0.0002 | 2.0000 | 0.0062 | 0.0005 |
| 86 | 12 | 687 | LPALSTGLIHL | 0.0011 | | | | |
| 86 | 12 | 2165 | LPCEPEPDV | 0.0001 | 0.0002 | 0.0001 | 0.0001 | 0.0002 |
| 93 | 13 | 169 | LPGCSFSI | 0.0110 | 0.0360 | 0.0059 | 0.0150 | 0.0016 |
| 93 | 13 | 169 | LPGCSFSIF | 0.1950 | 0.0796 | 0.0550 | 0.0813 | 0.0015 |
| 93 | 13 | 169 | LPGCSFSIFL | 0.0022 | 0.0009 | 0.0100 | 0.0140 | 0.0012 |
| 93 | 13 | 169 | LPGCSFSIFLL | 0.0007 | | | | |
| 93 | 13 | 37 | LPRRGPRL | 6.5000 | 0.0001 | 0.0180 | −0.0002 | 0.0020 |
| 93 | 13 | 37 | LPRRGPRLGV | 0.1900 | 0.0001 | 0.0009 | 0.0001 | 0.0025 |
| 93 | 13 | 1553 | LPVCQDHL | 0.0005 | | | | |
| 86 | 12 | 1553 | LPVCQDHLEF | 0.0001 | 0.0046 | 0.0002 | 0.0110 | 0.0003 |
| 86 | 12 | 1553 | LPVCQDHLEFW | 0.0001 | | | | |
| 86 | 12 | 1720 | LPYIEQGM | 0.0130 | 0.0001 | 0.0040 | −0.0002 | 0.0013 |
| 100 | 14 | 1260 | NPSVAATL | 0.0011 | | | | |
| 100 | 14 | 1260 | NPSVAATLGF | 0.0001 | 0.0001 | 0.0002 | 0.0001 | 0.0003 |
| 86 | 12 | 1605 | PPPSWDQM | 0.0003 | | | | |
| 79 | 11 | 1605 | PPPSWDQMW | 0.0001 | 0.0002 | 0.0001 | 0.0001 | 0.0002 |
| 79 | 11 | 1606 | PPSWDQMW | 0.0002 | | | | |
| 79 | 11 | 1606 | PPSWDQMWKC | 0.0001 | | | | |
| 79 | 11 | 2317 | PPVVHGCPL | 0.0140 | 0.0001 | 0.0001 | 0.0001 | −0.0002 |
| 79 | 11 | 2601 | QPEKGGRKPA | 0.0011 | 0.0001 | 0.0001 | 0.0002 | 0.0190 |
| 79 | 11 | 2808 | QPEYDLEL | 0.0002 | | | | |
| 79 | 11 | 2808 | QPEYDLELI | 0.0001 | 0.0002 | 0.0002 | 0.0001 | 0.0002 |
| 86 | 12 | 78 | QPGYPWPL | 0.0006 | | | | |
| 86 | 2 | 78 | QPGYPWPLY | 0.0001 | 0.0011 | 0.0002 | 0.0001 | 0.0002 |
| 93 | 13 | 57 | QPRGRRQPI | 0.2300 | 0.0002 | 0.0001 | 0.0001 | 0.0002 |
| 79 | 11 | 2299 | RPDYNPPL | 0.0050 | | | | |
| 93 | 13 | 1893 | SPGALVVGV | 0.0001 | 0.0002 | 0.0002 | 0.1200 | 0.0002 |
| 79 | 11 | 1893 | SPGALVVGVV | 0.0130 | 0.0001 | 0.0016 | 0.0001 | 0.0003 |
| 79 | 11 | 2931 | SPGEINRV | 0.0007 | | | | |
| 79 | 11 | 2931 | SPGEINRVA | 0.0003 | 0.0001 | 0.0001 | 0.0002 | 0.0037 |
| 79 | 11 | 2649 | SPGQRVEF | 0.0027 | | | | |
| 79 | 11 | 2649 | SPGQRVEFL | 0.1200 | 0.0002 | 0.0002 | 0.0001 | 0.0002 |
| 79 | 11 | 99 | SPRGSRPSW | 0.3800 | 0.0002 | 0.0005 | 0.0001 | 0.0002 |
| 86 | 12 | 1935 | SPTHYVPESDA | 0.0001 | | | | |
| 86 | 12 | 1975 | TPCSGSWL | 0.0028 | | | | |
| 79 | 11 | 1126 | TPCTCGSSDL | 0.0005 | 0.0001 | 0.0002 | 0.0001 | 0.0003 |
| 79 | 11 | 1126 | TPCTCGSSDLY | 0.0001 | | | | |
| 86 | 12 | 223 | TPGCVPCV | 0.0001 | | | | |
| 93 | 13 | 1550 | TPGLPVCQDHL | 0.0001 | | | | |
| 93 | 13 | 1627 | TPLLYRLGA | 0.0083 | 0.0001 | 0.0001 | 0.0002 | 0.2300 |
| 93 | 13 | 1627 | TPLLYRLGAV | 0.0120 | 0.0001 | 0.0008 | 0.0001 | 0.0110 |
| 86 | 12 | 2856 | TPVNSWLGNI | 0.0001 | 0.0001 | 0.0053 | 0.0006 | 0.0003 |
| 86 | 12 | 2856 | TPVNSWLGNII | 0.0001 | | | | |
| 86 | 12 | 1940 | VPESDAAA | 0.0022 | | | | |
| 86 | 12 | 1940 | VPESDAAARV | 0.0001 | 0.0001 | 0.0010 | 0.0001 | 0.0003 |
| 86 | 12 | 799 | WPLLLLLL | 0.0021 | | | | |
| 100 | 14 | 616 | YPYRLWHY | 0.0001 | | | | |
| | | | 76 | | | | | |

TABLE XII
HCV B27 Super Motif

| | | | | | |
|---|---|---|---|---|---|
| | | Peptide | No. of Amino | Sequence | Conservancy |
| Sequence | Position | No. | Acids | Frequency | (%) |

| | | | | |
|---|---|---|---|---|
| AKHMWNFI | 1767 | 8 | 12 | 86 |
| AKNEVFCV | 2593 | 8 | 12 | 86 |
| ARALAHGV | 148 | 8 | 14 | 100 |
| DRSELSPL | 663 | 8 | 11 | 79 |
| EKGGRKPA | 2603 | 8 | 11 | 79 |
| EKMALYDV | 2624 | 8 | 12 | 86 |
| FKQKALGL | 1733 | 8 | 12 | 86 |
| GHRMAWDM | 315 | 8 | 13 | 93 |
| GKSTKVPA | 1240 | 8 | 12 | 86 |
| GRKPARLI | 2606 | 8 | 11 | 79 |
| HRMAWDMM | 316 | 8 | 13 | 93 |
| IKGGRHLI | 1390 | 8 | 11 | 79 |
| IRTGVRTI | 1283 | 8 | 11 | 79 |
| KKCDELAA | 1403 | 8 | 14 | 100 |
| KKKCDELA | 1402 | 8 | 14 | 100 |
| LHGPTPLL | 1623 | 8 | 11 | 79 |
| LHQNIVDV | 697 | 8 | 12 | 86 |
| LRDLAVAV | 969 | 8 | 11 | 79 |
| NHVSPTHY | 1932 | 8 | 12 | 86 |
| PRGRRQPI | 58 | 8 | 13 | 93 |
| PRGSRPSW | 100 | 8 | 11 | 79 |
| PRRRSRNL | 112 | 8 | 12 | 86 |
| RHADVIPV | 1140 | 8 | 11 | 79 |
| RHTPVNSW | 2854 | 8 | 12 | 86 |
| RKLGVPPL | 2943 | 8 | 12 | 86 |
| RKPARLIV | 2607 | 8 | 11 | 79 |
| RRCRASGV | 2730 | 8 | 13 | 93 |
| RRGPPLGV | 39 | 8 | 13 | 93 |
| RRPQDVKF | 17 | 8 | 12 | 86 |
| SKKKCDEL | 1401 | 8 | 14 | 100 |
| SRNLGKVI | 116 | 8 | 12 | 86 |
| THIDAHFL | 1571 | 8 | 13 | 93 |
| TKLKLTPI | 2985 | 8 | 12 | 86 |
| TKVPAAYA | 1243 | 8 | 12 | 86 |
| TRCFDSTV | 2674 | 8 | 14 | 100 |
| TRGVAKAV | 1191 | 8 | 11 | 79 |
| VRVCEKMA | 2620 | 8 | 14 | 100 |
| VRVLEDGV | 155 | 8 | 13 | 93 |
| YRGLDVSV | 1423 | 8 | 14 | 100 |
| ARHTPVNSW | 2853 | 9 | 11 | 79 |
| ARLIVFPDL | 2610 | 9 | 11 | 79 |
| ARLVVLATA | 1346 | 9 | 11 | 79 |
| ARMILMTHF | 2874 | 9 | 12 | 86 |
| ARPDYNPPL | 2298 | 9 | 11 | 79 |
| DRSELSPLL | 663 | 9 | 11 | 79 |
| EKMALYDVV | 2624 | 9 | 12 | 86 |
| FKQKALGLL | 1733 | 9 | 12 | 86 |
| GHRMAWDMM | 315 | 9 | 13 | 93 |
| GKSTKVPAA | 1240 | 9 | 12 | 86 |
| GRKPARLIV | 2608 | 9 | 11 | 79 |
| HRMAWDMMM | 316 | 9 | 12 | 86 |
| IKGGRHLIF | 1390 | 9 | 11 | 79 |
| KKKCDELAA | 1402 | 9 | 14 | 100 |
| LHGLSAFSL | 2919 | 9 | 11 | 79 |
| LHGPTPLLY | 1623 | 9 | 11 | 79 |
| LHSYSPGEI | 2927 | 9 | 11 | 79 |
| LKGSSGGPL | 1166 | 9 | 12 | 86 |
| LRKLGVPPL | 2942 | 9 | 12 | 86 |
| NHVSPTHYV | 1932 | 9 | 12 | 86 |
| NRRPQDVKF | 16 | 9 | 11 | 79 |
| PRRGPRLGV | 38 | 9 | 13 | 93 |
| RHTPVNSWL | 2854 | 9 | 12 | 86 |
| RHVGPGEGA | 1909 | 9 | 11 | 79 |
| RKPARLIVF | 2607 | 9 | 11 | 79 |
| RRCRASGVL | 2730 | 9 | 12 | 86 |
| RRSRNLGKV | 114 | 9 | 12 | 86 |
| SKKKCDELA | 1401 | 9 | 14 | 100 |
| THYVPESDA | 1937 | 9 | 12 | 86 |
| TKVPAAYAA | 1243 | 9 | 11 | 79 |
| TRHADVIPV | 1139 | 9 | 11 | 79 |
| TRVESENKV | 2251 | 9 | 12 | 86 |
| VKFPGGGQI | 22 | 9 | 13 | 93 |
| VRVCEKMAL | 2620 | 9 | 14 | 100 |
| WRLLAPITA | 1028 | 9 | 11 | 79 |
| WRQEMGGNI | 2242 | 9 | 12 | 86 |
| YRGLDVSVI | 1423 | 9 | 14 | 100 |
| YRRCRASGV | 2729 | 9 | 13 | 93 |
| ARALAHGVRV | 148 | 10 | 14 | 100 |
| ARAQAPPPSW | 1600 | 10 | 11 | 79 |
| ARHTPVNSWL | 2853 | 10 | 11 | 79 |
| ARMILMTHFF | 2874 | 10 | 12 | 86 |
| CHSKKKCDEL | 1399 | 10 | 14 | 100 |
| DRDRSELSPL | 661 | 10 | 11 | 79 |
| DRSELSPLLL | 663 | 10 | 11 | 79 |
| EKGGRKPARL | 2603 | 10 | 11 | 79 |
| FRAAVCTRGV | 1185 | 10 | 12 | 86 |
| GHRMAWDMMM | 315 | 10 | 12 | 86 |
| GKSTKVPAAY | 1240 | 10 | 12 | 86 |
| GRKPARLIVF | 2606 | 10 | 11 | 79 |
| KHMWNFISGI | 1768 | 10 | 13 | 93 |
| KKCDELAAKL | 1403 | 10 | 12 | 86 |
| LHQNIVDVQY | 697 | 10 | 11 | 79 |
| LKGSSGGPLL | 1166 | 10 | 12 | 86 |
| QKALGLLQTA | 1735 | 10 | 12 | 86 |
| RHVGPGEGAV | 1909 | 10 | 11 | 79 |
| RRGPRLGVRA | 39 | 10 | 13 | 93 |
| RRHVGPGEGA | 1908 | 10 | 11 | 79 |
| RRRSRNLGKV | 113 | 10 | 12 | 86 |
| RRSRNLGKVI | 114 | 10 | 12 | 86 |
| SKFGYGAKDV | 2552 | 10 | 12 | 86 |
| SKKKCDELAA | 1401 | 10 | 14 | 100 |
| THYVPESDAA | 1937 | 10 | 12 | 86 |
| TRGVAKAVDF | 1191 | 10 | 11 | 79 |
| TRVESENKVV | 2251 | 10 | 12 | 86 |
| VKFPGGGQIV | 22 | 10 | 13 | 93 |
| VRVCEKMALY | 2620 | 10 | 14 | 100 |
| VRVLEDGVNY | 155 | 10 | 12 | 86 |
| WRLLAPITAY | 1028 | 10 | 11 | 79 |
| YKVLVLNPSV | 1254 | 10 | 14 | 100 |
| YRRCRASGVL | 2729 | 10 | 12 | 86 |
| AHGVRVLEDGV | 152 | 11 | 13 | 93 |
| AKHMWNFISGI | 1767 | 11 | 12 | 86 |
| ARALAHGVRVL | 148 | 11 | 14 | 100 |
| ARLIVFPDLGV | 2610 | 11 | 11 | 79 |
| CHSKKKCDELA | 1399 | 11 | 14 | 100 |
| DRDRSELSPLL | 661 | 11 | 11 | 79 |
| EKGGRKPARLI | 2603 | 11 | 11 | 79 |
| FRAAVCTRGVA | 1185 | 11 | 11 | 79 |
| GKSTKVPAAYA | 1240 | 11 | 12 | 86 |
| GKVIDTLTCGF | 120 | 11 | 12 | 86 |
| HRMAWDMMMNW | 316 | 11 | 12 | 86 |
| KKKCDELAAKL | 1402 | 11 | 12 | 86 |
| KRNTNRRPQDV | 12 | 11 | 12 | 86 |
| LHGPTPLLYRL | 1623 | 11 | 11 | 79 |
| LHQNIVDVQYL | 697 | 11 | 11 | 79 |
| LKPTLHGPTPL | 1619 | 11 | 11 | 79 |
| LRRHVGPGEGA | 1907 | 11 | 11 | 79 |
| PRRGPRLGVRA | 38 | 11 | 13 | 93 |
| PRRRSRNLGKV | 112 | 11 | 12 | 86 |
| RRHVGPGEGAV | 1908 | 11 | 11 | 79 |
| RRRSRNLGKVI | 113 | 11 | 12 | 86 |
| SRGNHVSPTHY | 1929 | 11 | 12 | 86 |
| SRNLGKVIDTL | 116 | 11 | 12 | 86 |
| THYVPESDAAA | 1937 | 11 | 12 | 86 |
| VRVLEDGVNYA | 155 | 11 | 12 | 86 |
| YKVLVLNPSVA | 1254 | 11 | 14 | 100 |
| 136 | | | | |

TABLE XIII
HCV B58 Super Motif

| | | No. of | | |
|---|---|---|---|---|
| | | Amino | Sequence | Conservancy |
| Sequence | Positon | Acids | Frequency | (%) |
| AAILRRHV | 1904 | 8 | 13 | 93 |
| AALAAYCL | 1673 | 8 | 12 | 86 |
| AAQGYKVL | 1250 | 8 | 11 | 79 |
| AATLGFGA | 1264 | 8 | 14 | 100 |
| AAVCTRGV | 1187 | 8 | 12 | 86 |
| ASLMAFTA | 1793 | 8 | 11 | 79 |
| ASSSASQL | 2204 | 8 | 14 | 100 |
| ATLGFGAY | 1265 | 8 | 14 | 100 |
| CSFSIFLL | 172 | 8 | 14 | 100 |
| CSGGAYDI | 1310 | 8 | 12 | 86 |
| CSSNVSVA | 2819 | 8 | 14 | 100 |
| CTCGSSDL | 1128 | 8 | 11 | 79 |
| CTRGVAKA | 1190 | 8 | 11 | 79 |
| DTAACGDI | 994 | 8 | 12 | 86 |
| DTLTCGFA | 124 | 8 | 12 | 86 |
| EAALENLV | 750 | 8 | 11 | 79 |
| EAMTRYSA | 2794 | 8 | 14 | 100 |
| ESDAAARV | 1942 | 8 | 12 | 86 |
| ETAGARLV | 1342 | 8 | 12 | 86 |
| ETTMRSPV | 1207 | 8 | 12 | 86 |
| FADLMGYI | 130 | 8 | 13 | 93 |
| FASRGNHV | 1927 | 8 | 14 | 100 |
| FSIFLLAL | 174 | 8 | 14 | 100 |
| FSYDTRCF | 2670 | 8 | 11 | 79 |
| FTEAMTRY | 2792 | 8 | 14 | 100 |
| FTPSPVVV | 512 | 8 | 13 | 93 |
| GAGVAGAL | 1861 | 8 | 12 | 86 |
| GAHWGVLA | 350 | 8 | 12 | 86 |
| GALVVGVV | 1895 | 8 | 11 | 79 |
| GARLVVLA | 1345 | 8 | 12 | 86 |
| GSGKSTKV | 1238 | 8 | 13 | 93 |
| GSSDLYLV | 1131 | 8 | 12 | 86 |
| GSSGGPLL | 1168 | 8 | 12 | 86 |
| GSSYGFQY | 2641 | 8 | 11 | 79 |
| GTFPINAY | 2063 | 8 | 11 | 79 |
| HSYSPGEI | 2928 | 8 | 11 | 79 |
| HTPVNSWL | 2855 | 8 | 12 | 86 |
| ISGIQYLA | 1774 | 8 | 14 | 100 |
| ITSCSSNV | 2816 | 8 | 14 | 100 |
| ITWGADTA | 989 | 8 | 12 | 86 |
| KSTKVPAA | 1241 | 8 | 12 | 86 |
| LAGYGAGV | 1857 | 8 | 11 | 79 |
| LAHGVRVL | 151 | 8 | 14 | 100 |
| LAVAVEPV | 972 | 8 | 11 | 79 |
| LSAPSLKA | 2211 | 8 | 11 | 79 |
| LSPGALVV | 1892 | 8 | 13 | 93 |
| LSTGLIHL | 690 | 8 | 12 | 86 |
| LTCGFADL | 126 | 8 | 12 | 86 |
| LTHIDAHF | 1570 | 8 | 13 | 93 |
| MSADLEVV | 1654 | 8 | 11 | 79 |
| NSWLGNII | 2859 | 8 | 14 | 100 |
| NTCVTQTV | 1460 | 8 | 12 | 86 |
| NTNGSWHI | 416 | 8 | 13 | 93 |
| PAILSPGA | 1889 | 8 | 13 | 93 |
| PALSTGLI | 688 | 8 | 12 | 86 |
| PTLWARMI | 2870 | 8 | 11 | 79 |
| PTPLLYRL | 1626 | 8 | 14 | 100 |
| QATVCARA | 1595 | 8 | 13 | 93 |
| RARPRWFM | 3019 | 8 | 14 | 100 |
| RSELSPLL | 664 | 8 | 11 | 79 |
| RSRNLGKV | 115 | 8 | 12 | 86 |
| SAFSLHSY | 2923 | 8 | 11 | 79 |
| SSASQLSA | 2206 | 8 | 14 | 100 |
| STKVPAAY | 1242 | 8 | 12 | 86 |
| STLPGNPA | 1784 | 8 | 14 | 100 |
| STLPQAVM | 2633 | 8 | 12 | 86 |
| STYGKFLA | 1299 | 8 | 12 | 86 |
| TAACGDII | 995 | 8 | 12 | 86 |
| TAGARLVV | 1343 | 8 | 12 | 86 |
| TTMRSPVF | 1208 | 8 | 12 | 86 |
| TTSCGNTL | 2739 | 8 | 11 | 79 |
| VAGALVAF | 1664 | 8 | 12 | 86 |
| VTRHADVI | 1138 | 8 | 11 | 79 |
| VTSTWVLV | 1661 | 8 | 12 | 86 |
| WAKHMWNF | 1766 | 8 | 12 | 86 |
| WAKVLIVM | 368 | 8 | 14 | 100 |
| WAQPGYPW | 76 | 8 | 12 | 86 |
| YAAQGYKV | 1249 | 8 | 11 | 79 |
| YSIEPLDL | 2905 | 8 | 11 | 79 |
| YSTYGKFL | 1298 | 8 | 12 | 86 |
| YTNVDQDL | 1106 | 8 | 11 | 79 |
| AAKLQDCTM | 2758 | 9 | 16 | 114 |
| AAQGYKVLV | 1250 | 9 | 11 | 79 |
| AARALAHGV | 147 | 9 | 11 | 79 |
| AATLGFGAY | 1264 | 9 | 14 | 100 |
| AAVCTRGVA | 1187 | 9 | 11 | 79 |
| ASQLSAPSL | 2208 | 9 | 13 | 93 |
| ATLGFGAYM | 1265 | 9 | 26 | 186 |
| ATVCARAQA | 1596 | 9 | 11 | 79 |
| CAAILRRHV | 1903 | 9 | 13 | 93 |
| CAWYELTPA | 1530 | 9 | 11 | 79 |
| CSFSIFLLA | 172 | 9 | 14 | 100 |
| CSGGAYDII | 1310 | 9 | 12 | 86 |
| CTCGSSDLY | 1128 | 9 | 11 | 79 |
| CTRGVAKAV | 1190 | 9 | 11 | 79 |
| CTWMNSTGF | 555 | 9 | 11 | 79 |
| DAGCAWYEL | 1527 | 9 | 11 | 79 |
| DTAACGDII | 994 | 9 | 12 | 86 |
| DTRCFDSTV | 2673 | 9 | 13 | 93 |
| ETAGARLVV | 1342 | 9 | 12 | 86 |
| ETTMRSPVF | 1207 | 9 | 12 | 86 |
| FSIFLLALL | 174 | 9 | 14 | 100 |
| FSLDPTFTI | 1469 | 9 | 14 | 100 |
| FTGLTHIDA | 1567 | 9 | 13 | 93 |
| GAGVAGALV | 1861 | 9 | 12 | 86 |
| GALVAFKIM | 1866 | 9 | 12 | 86 |
| GALVAFKVM | 1866 | 9 | 14 | 100 |
| GAVQWMNRL | 1916 | 9 | 14 | 100 |
| HSKKKCDEL | 1400 | 9 | 14 | 100 |
| HTPGCVPCV | 222 | 9 | 11 | 79 |
| ITWGADTAA | 989 | 9 | 12 | 86 |
| ITYSTYGKF | 1296 | 9 | 12 | 86 |
| KALGLLQTA | 1736 | 9 | 12 | 86 |
| KSTKVPAAY | 1241 | 9 | 12 | 86 |
| LAALAAYCL | 1672 | 9 | 12 | 86 |
| LAEQFKQKA | 1729 | 9 | 12 | 86 |
| LAGLAYYSM | 356 | 9 | 14 | 100 |
| LAGYGAGVA | 1857 | 9 | 11 | 79 |
| LSAFSLHSY | 2922 | 9 | 11 | 79 |
| LSTLPGNPA | 1783 | 9 | 14 | 100 |
| LTCGFADLM | 126 | 9 | 24 | 171 |
| LTDPSHITA | 2180 | 9 | 14 | 100 |
| LTGRDKNQV | 1052 | 9 | 12 | 86 |
| LTHIDAHFL | 1570 | 9 | 13 | 93 |
| LTTSCGNTL | 2738 | 9 | 11 | 79 |
| MAKNEVFCV | 2592 | 9 | 12 | 86 |
| MAWDMMMNW | 318 | 9 | 12 | 86 |
| NAVAYYRGL | 1418 | 9 | 13 | 93 |
| NSLLRHHNM | 2481 | 9 | 14 | 100 |
| NSWLGNIIM | 2859 | 9 | 24 | 171 |
| NTNRRPQDV | 14 | 9 | 12 | 86 |
| PAILSPGAL | 1889 | 9 | 13 | 93 |
| PSVAATLGF | 1261 | 9 | 14 | 100 |
| PTLHGPTPL | 1621 | 9 | 11 | 79 |
| PTLWARMIL | 2870 | 9 | 11 | 79 |
| QAETAGARL | 1340 | 9 | 12 | 86 |
| RAAVCTRGV | 1186 | 9 | 12 | 86 |
| RALAHGVRV | 149 | 9 | 14 | 100 |
| RAQAPPPSW | 1601 | 9 | 11 | 79 |
| RAYAMDREM | 811 | 9 | 16 | 114 |
| RSELSPLLL | 664 | 9 | 11 | 79 |
| RSRNLGKVI | 115 | 9 | 12 | 86 |
| SSSASQLSA | 2205 | 9 | 14 | 100 |
| STKVPAAYA | 1242 | 9 | 12 | 86 |
| STLPGNPAI | 1784 | 9 | 11 | 79 |
| STWVLVGGV | 1663 | 9 | 12 | 86 |
| TAGARLVVL | 1343 | 9 | 12 | 86 |
| TSCSSNVSV | 2817 | 9 | 14 | 100 |
| TTIMAKNEV | 2589 | 9 | 11 | 79 |
| VAATLGFGA | 1263 | 9 | 14 | 100 |
| VAGGHYVQM | 933 | 9 | 14 | 100 |
| VAYQATVCA | 1592 | 9 | 12 | 86 |
| VAYYRGLDV | 1420 | 9 | 14 | 100 |
| VSTLPQAVM | 2632 | 9 | 12 | 86 |
| VTQTVDFSL | 1463 | 9 | 12 | 86 |
| WAKHMWNFI | 1766 | 9 | 12 | 86 |
| YAAQGYKVL | 1249 | 9 | 11 | 79 |
| YAPTLWARM | 2868 | 9 | 14 | 100 |
| YSPGEINRV | 2930 | 9 | 11 | 79 |
| YSPGQRVEF | 2848 | 9 | 11 | 79 |
| YSTYGKFLA | 1298 | 9 | 12 | 86 |
| YTNVDQDLV | 1106 | 9 | 11 | 79 |
| AAQGYKVLVL | 1250 | 10 | 11 | 79 |
| AATLGFGAYM | 1264 | 10 | 28 | 186 |
| ASLRVFTEAM | 2787 | 10 | 12 | 86 |
| ASSSASQLSA | 2204 | 10 | 14 | 100 |
| ATGNLPGCSF | 165 | 10 | 13 | 93 |
| CSFSIFLLAL | 172 | 10 | 14 | 100 |
| CTCGSSDLYL | 1128 | 10 | 11 | 79 |
| DARVCACLWM | 733 | 10 | 18 | 129 |
| DSVIDCNTCV | 1454 | 10 | 12 | 86 |
| DTLTCGFADL | 124 | 10 | 12 | 86 |
| EANLLWRQEM | 2237 | 10 | 24 | 171 |
| ETAGARLVVL | 1342 | 10 | 12 | 86 |
| FADLMGYIPL | 130 | 10 | 11 | 79 |
| FTEAMTRYSA | 2792 | 10 | 14 | 100 |
| GAARALAHGV | 146 | 10 | 11 | 79 |
| GADTAACGDI | 992 | 10 | 12 | 86 |
| GAGVAGALVA | 1861 | 10 | 12 | 86 |
| GALVVGVVCA | 1895 | 10 | 11 | 79 |
| GARLVVLATA | 1345 | 10 | 11 | 79 |
| GAVQWMNRLI | 1916 | 10 | 14 | 100 |
| GSGKSTKVPA | 1238 | 10 | 12 | 86 |
| GTVLDQAETA | 1335 | 10 | 14 | 100 |
| HSKKKCDELA | 1400 | 10 | 14 | 100 |
| IAFASRGNHV | 1925 | 10 | 14 | 100 |
| ISGIQYLAGL | 1774 | 10 | 14 | 100 |
| ITRVESENKV | 2250 | 10 | 12 | 86 |
| ITSCSSNVSV | 2816 | 10 | 14 | 100 |
| ITYSTYGKFL | 1296 | 10 | 11 | 79 |
| KSTKVPAAYA | 1241 | 10 | 12 | 86 |
| LADGGCSGGA | 1305 | 10 | 11 | 79 |
| LAEQFKQKAL | 1729 | 10 | 12 | 86 |
| LALPPRAYAM | 806 | 10 | 12 | 86 |
| LSPGALVVGV | 1892 | 10 | 13 | 93 |
| LSPRGSRPSW | 98 | 10 | 11 | 79 |
| LSRARPRWFM | 3017 | 10 | 14 | 100 |
| LSTLPGNPAI | 1783 | 10 | 11 | 79 |
| LTHPITKYIM | 1642 | 10 | 16 | 114 |
| NTCVTQTVDF | 1460 | 10 | 12 | 86 |
| PAILSPGALV | 1889 | 10 | 12 | 86 |
| PALSTGLIHL | 688 | 10 | 12 | 86 |
| PARLIVFPDL | 2609 | 10 | 11 | 79 |
| PSWDQMWKCL | 1607 | 10 | 11 | 79 |
| PTGSGKSTKV | 1236 | 10 | 13 | 93 |
| PTHYVPESDA | 1936 | 10 | 12 | 86 |
| PTLHGPTPLL | 1621 | 10 | 11 | 79 |
| PTLWARMILM | 2870 | 10 | 22 | 157 |
| PTPLLYRLGA | 1628 | 10 | 13 | 93 |
| QAETAGARLV | 1340 | 10 | 12 | 86 |
| QAPPPSWDQM | 1603 | 10 | 24 | 171 |
| QATVCARAQA | 1595 | 10 | 11 | 79 |
| RAAKLQDCTM | 2757 | 10 | 16 | 114 |
| RAAVCTRGVA | 1186 | 10 | 11 | 79 |
| RALAHGVRVL | 149 | 10 | 14 | 100 |
| SASQLSAPSL | 2207 | 10 | 13 | 93 |
| STKVPAAYAA | 1242 | 10 | 11 | 79 |
| STWVLVGGVL | 1663 | 10 | 12 | 86 |
| TAGARLVVLA | 1343 | 10 | 12 | 86 |
| TARHTPVNSW | 2852 | 10 | 11 | 79 |
| TSCSSNVSVA | 2817 | 10 | 14 | 100 |
| TSMLTDPSHI | 2177 | 10 | 13 | 93 |
| TSTWVLVGGV | 1662 | 10 | 12 | 86 |
| TTIMAKNEVF | 2589 | 10 | 11 | 79 |
| TTLPALSTGL | 685 | 10 | 11 | 79 |
| VAATLGFGAY | 1263 | 10 | 14 | 100 |
| VTPGERPSGM | 1507 | 10 | 16 | 114 |
| VTRHADVIPV | 1138 | 10 | 11 | 79 |
| WAQPGYPWPL | 76 | 10 | 12 | 86 |
| WARMILMTHF | 2873 | 10 | 12 | 86 |
| WARPDYNPPL | 2297 | 10 | 11 | 79 |
| YAAQGYKVLV | 1249 | 10 | 11 | 79 |
| YSPGEINRVA | 2930 | 10 | 11 | 79 |
| YSPGQRVEFL | 2648 | 10 | 11 | 79 |
| AARALAHGVRV | 147 | 11 | 11 | 79 |
| AASLRVFTEAM | 2786 | 11 | 12 | 86 |
| AAVCTRGVAKA | 1187 | 11 | 11 | 79 |
| ASHLPYIEQGM | 1717 | 11 | 14 | 100 |
| ASQLSAPSLKA | 2208 | 11 | 11 | 79 |
| CARAQAPPPSW | 1599 | 11 | 11 | 79 |
| CSFSIFLLALL | 172 | 11 | 14 | 100 |
| CTCGSSDLYLV | 1128 | 11 | 11 | 79 |
| CTRGVAKAVDF | 1190 | 11 | 11 | 79 |
| DARVCACLWMM | 733 | 11 | 16 | 114 |
| DTLTCGFADLM | 124 | 11 | 24 | 171 |
| ETAGARLVVLA | 1342 | 11 | 12 | 86 |
| FADLMGYIPLV | 130 | 11 | 11 | 79 |
| FSLHSYSPGEI | 2925 | 11 | 11 | 79 |
| FTGLTHIDAHF | 1567 | 11 | 13 | 93 |
| FTTLPALSTGL | 684 | 11 | 11 | 79 |
| GADTAACGDII | 992 | 11 | 12 | 86 |
| GAGVAGALVAF | 1861 | 11 | 12 | 86 |
| GALVVQVVCAA | 1895 | 11 | 11 | 79 |
| GAVQWMNRLIA | 1916 | 11 | 14 | 100 |
| GSGKSTKVPAA | 1238 | 11 | 12 | 86 |
| HSKKKCDELAA | 1400 | 11 | 14 | 100 |
| HSYSPGEINRV | 2928 | 11 | 11 | 79 |
| HTPVNSWLGNI | 2855 | 11 | 12 | 86 |
| ITRVESENKVV | 2250 | 11 | 12 | 86 |
| ITSCSSNVSVA | 2816 | 11 | 14 | 100 |
| ITYSTYGKFLA | 1296 | 11 | 11 | 79 |
| KSTKVPAAYAA | 1241 | 11 | 11 | 79 |
| LADGGCSGGAY | 1305 | 11 | 11 | 79 |
| LAGYGAGVAGA | 1857 | 11 | 11 | 79 |
| LSNSLLRHHNM | 2479 | 11 | 14 | 100 |
| LSPGALVVGVV | 1892 | 11 | 11 | 79 |
| LTCGFADLMGY | 126 | 11 | 12 | 86 |
| LTSMLTDPSHI | 2176 | 11 | 13 | 93 |
| NAVAYYRGLDV | 1418 | 11 | 13 | 93 |
| NTNRRPQDVKF | 14 | 11 | 11 | 79 |
| PAILSPGALVV | 1889 | 11 | 12 | 86 |
| PSVAATLGFGA | 1261 | 11 | 14 | 100 |
| PTDPRRRSRNL | 109 | 11 | 12 | 86 |
| PTHYVPESDAA | 1936 | 11 | 12 | 86 |
| PTLHGPTPLLY | 1621 | 11 | 11 | 79 |
| PTPLLYRLGAV | 1626 | 11 | 13 | 93 |
| QAETAGARLVV | 1340 | 11 | 12 | 86 |
| QAPPPSWDQMW | 1603 | 11 | 11 | 79 |
| QTVDFSLDPTF | 1465 | 11 | 12 | 86 |
| RSQPRGRRQPI | 55 | 11 | 13 | 93 |
| SADLEVVTSTW | 1655 | 11 | 11 | 79 |
| SSASQLSAPSL | 2206 | 11 | 13 | 93 |
| SSDLYLVTRHA | 1132 | 11 | 12 | 86 |
| STWVLVGGVLA | 1663 | 11 | 12 | 86 |
| TARHTPVNSWL | 2852 | 11 | 11 | 79 |
| TSLTGRDKNQV | 1050 | 11 | 12 | 86 |
| TSTWVLVGGVL | 1662 | 11 | 12 | 86 |
| TTLPALSTGLI | 685 | 11 | 11 | 79 |
| VAATLGFGAYM | 1263 | 11 | 26 | 186 |
| VAGALVAFKVM | 1864 | 11 | 14 | 100 |
| VAVEPVVFSDM | 974 | 11 | 12 | 86 |
| VAYQATVCARA | 1592 | 11 | 11 | 79 |
| VAYYRGLDVSV | 1420 | 11 | 14 | 100 |
| VTSTWVLVGGV | 1661 | 11 | 12 | 86 |
| WAQPGYPWPLY | 76 | 11 | 12 | 86 |
| WARMILMTHFF | 2873 | 11 | 12 | 86 |
| YAAQGYKVLVL | 1249 | 11 | 11 | 79 |
| YATGNLPGCSF | 164 | 11 | 12 | 86 |
| YTNVDQDLVGW | 1106 | 11 | 11 | 79 |
| 299 | | | | |

TABLE XIV

| | | | | | |
|---|---|---|---|---|---|
| | | | No. of | Sequence | Conservancy |
| Sequence | Position | Peptide No. | Amino Acids | Frequency | (%) |

HCV B62 Super Motif

| | | | | |
|---|---|---|---|---|
| AILSPGAL | 1890 | 8 | 13 | 93 |
| ALAHGVRV | 150 | 8 | 14 | 100 |
| ALGLLQTA | 1737 | 8 | 12 | 86 |
| APTLWARM | 2869 | 8 | 11 | 79 |
| AQAPPPSW | 1602 | 8 | 12 | 86 |
| AQGYKVLV | 1251 | 8 | 11 | 79 |
| AVAYYRGL | 1419 | 8 | 14 | 100 |
| AVCTRGVA | 1188 | 8 | 11 | 79 |
| AVQWMNRL | 1917 | 8 | 14 | 100 |
| CLWMMLLI | 739 | 8 | 12 | 86 |
| CMSADLEV | 1653 | 8 | 11 | 79 |
| CQDHLEFW | 1556 | 8 | 12 | 86 |
| CVTQTVDF | 1462 | 8 | 12 | 86 |
| DILAGYGA | 1855 | 8 | 12 | 86 |
| DLCGSVFL | 279 | 8 | 12 | 86 |
| DLMGYIPL | 132 | 8 | 11 | 79 |
| DLVNLLPA | 1883 | 8 | 11 | 79 |
| DQAETAGA | 1339 | 8 | 12 | 86 |
| EIPFYGKA | 1377 | 8 | 13 | 93 |
| EQFKQKAL | 1731 | 8 | 12 | 86 |
| EVVTSTWV | 1659 | 8 | 12 | 86 |
| FISGIQYL | 1773 | 8 | 14 | 100 |
| FPDLGVRV | 2615 | 8 | 11 | 79 |
| FPGGGQIV | 24 | 8 | 14 | 100 |
| FQVAHLHA | 1228 | 8 | 12 | 86 |
| GIQYLAGL | 1776 | 8 | 14 | 100 |
| GLRDLAVA | 968 | 8 | 11 | 79 |
| GPRLGVRA | 41 | 8 | 13 | 93 |
| GQIVGGVY | 28 | 8 | 14 | 100 |
| GVAGALVA | 1863 | 8 | 12 | 86 |
| GVAKAVDF | 1193 | 8 | 11 | 79 |
| GVLAALAA | 1670 | 8 | 12 | 86 |
| GVRVCEKM | 2619 | 8 | 14 | 100 |
| GVVCAAIL | 1900 | 8 | 11 | 79 |
| HVGPGEGA | 1910 | 8 | 11 | 79 |
| HVSPTHYV | 1933 | 8 | 12 | 86 |
| ILGGWVAA | 1816 | 8 | 12 | 86 |
| ILGIGTVL | 1331 | 8 | 12 | 86 |
| ILSPGALV | 1891 | 8 | 13 | 93 |
| IMAKNEVF | 2591 | 8 | 12 | 86 |
| IPFYGKAI | 1378 | 8 | 13 | 93 |
| IPLVGAPL | 137 | 8 | 11 | 79 |
| IVDVQYLY | 701 | 8 | 12 | 86 |
| IVFPDLGV | 2613 | 8 | 11 | 79 |
| IVGGVYLL | 30 | 8 | 13 | 93 |
| KMALYDVV | 2625 | 8 | 12 | 86 |
| KPARLIVF | 2608 | 8 | 12 | 86 |
| KQKALGLL | 1734 | 8 | 12 | 86 |
| KVPAAYAA | 1244 | 8 | 11 | 79 |
| LIEANLLW | 2235 | 8 | 12 | 86 |
| LINTNGSW | 414 | 8 | 11 | 79 |
| LLALLSCL | 178 | 8 | 12 | 86 |
| LLAPITAY | 1030 | 8 | 14 | 100 |
| LLLADARV | 729 | 8 | 13 | 93 |
| LLYRLGAV | 1629 | 8 | 13 | 93 |
| LMGYIPLV | 133 | 8 | 11 | 79 |
| LPALSTGL | 687 | 8 | 14 | 100 |
| LPGCSFSI | 169 | 8 | 13 | 93 |
| LPRRGPRL | 37 | 8 | 13 | 93 |
| LPVCQDHL | 1553 | 8 | 13 | 93 |
| LPYIEQGM | 1720 | 8 | 12 | 86 |
| LQDCTMLV | 2761 | 8 | 12 | 86 |
| LVAYQATV | 1591 | 8 | 12 | 86 |
| LVDILAGY | 1853 | 8 | 11 | 79 |
| LVGGVLAA | 1667 | 8 | 12 | 86 |
| LVLNPSVA | 1257 | 8 | 14 | 100 |
| LVNLLPAI | 1884 | 8 | 11 | 79 |
| LVTRHADV | 1137 | 8 | 12 | 86 |
| LVVGVVCA | 1897 | 8 | 11 | 79 |
| LVVICESA | 2773 | 8 | 11 | 79 |
| MILMTHFF | 2876 | 8 | 12 | 86 |
| MLTDPSHI | 2179 | 8 | 14 | 100 |
| NILGGWVA | 1815 | 8 | 12 | 86 |
| NIVDVQYL | 700 | 8 | 12 | 86 |
| NLLWRQEM | 2239 | 8 | 12 | 86 |
| NPSVAATL | 1260 | 8 | 14 | 100 |
| PLGGAARA | 143 | 8 | 11 | 79 |
| PLLYRLGA | 1628 | 8 | 13 | 93 |
| PPPSWDQM | 1605 | 8 | 12 | 86 |
| PPSWDQMW | 1606 | 8 | 11 | 79 |
| PVVHGCPL | 2318 | 8 | 11 | 79 |
| QIVGGVYL | 29 | 8 | 13 | 93 |
| QLLRIPQA | 336 | 8 | 12 | 86 |
| QPEYDLEL | 2808 | 8 | 11 | 79 |
| QPGYPWPL | 78 | 8 | 12 | 86 |
| RLHGLSAF | 2918 | 8 | 12 | 86 |
| RLIVFPDL | 2611 | 8 | 11 | 79 |
| RLLAPITA | 1029 | 8 | 12 | 86 |
| RLVVLATA | 1347 | 8 | 12 | 86 |
| RMAWDMMM | 317 | 8 | 12 | 86 |
| RMILMTHF | 2875 | 8 | 12 | 86 |
| RPDYNPPL | 2299 | 8 | 11 | 79 |
| RQEMGGNI | 2243 | 8 | 12 | 86 |
| RVCEKMAL | 2621 | 8 | 14 | 100 |
| RVESENKV | 2252 | 8 | 12 | 86 |
| RVGDFHYV | 2100 | 8 | 11 | 79 |
| SIFLLALL | 175 | 8 | 14 | 100 |
| SLDPTFTI | 1470 | 8 | 14 | 100 |
| SPGEINRV | 2931 | 8 | 11 | 79 |
| SPGQRVEF | 2649 | 8 | 11 | 79 |
| SQLSAPSL | 2209 | 8 | 13 | 93 |
| SVAATLGF | 1262 | 8 | 14 | 100 |
| TIMAKNEV | 2590 | 8 | 11 | 79 |
| TLGFGAYM | 1266 | 8 | 13 | 93 |
| TLHGPTPL | 1622 | 8 | 11 | 79 |
| TLPGNPAI | 1785 | 8 | 11 | 79 |
| TLWARMIL | 2871 | 8 | 11 | 79 |
| TPCSGSWL | 1975 | 8 | 12 | 86 |
| TPGCVPCV | 223 | 8 | 12 | 86 |
| TQTVDFSL | 1464 | 8 | 12 | 86 |
| TVCARAQA | 1597 | 8 | 11 | 79 |
| VIDCNTCV | 1456 | 8 | 12 | 86 |
| VLAALAAY | 1671 | 8 | 12 | 86 |
| VLCECYDA | 1521 | 8 | 13 | 93 |
| VLDQAETA | 1337 | 8 | 14 | 100 |
| VLEDGVNY | 157 | 8 | 12 | 86 |
| VLNPSVAA | 1258 | 8 | 14 | 100 |
| VLVGGVLA | 1666 | 8 | 12 | 86 |
| VLVLNPSV | 1256 | 8 | 14 | 100 |
| VMGSSYGF | 2639 | 8 | 11 | 79 |
| VPESDAAA | 1940 | 8 | 12 | 86 |
| VQWMNRLI | 1918 | 8 | 14 | 100 |
| VVATDALM | 1439 | 8 | 11 | 79 |
| VVGVVCAA | 1898 | 8 | 11 | 79 |
| VVTSTWVL | 1660 | 8 | 12 | 86 |
| WMNRLIAF | 1920 | 8 | 14 | 100 |
| WPLLLLLL | 799 | 8 | 12 | 86 |
| WVLVGGVL | 1665 | 8 | 12 | 86 |
| YLAGLSTL | 1779 | 8 | 14 | 100 |
| YPYRLWHY | 616 | 8 | 14 | 100 |
| YVPESDAA | 1939 | 8 | 12 | 86 |
| AILSPGALV | 1890 | 9 | 12 | 86 |
| ALAHGVRVL | 150 | 9 | 14 | 100 |
| ALSTGLIHL | 689 | 9 | 12 | 86 |
| ALVVGVVCA | 1896 | 9 | 11 | 79 |
| APPPSWDQM | 1604 | 9 | 12 | 86 |
| APTLWARMI | 2869 | 9 | 11 | 79 |
| AQGYKVLVL | 1251 | 9 | 11 | 79 |
| AQPGYPWPL | 77 | 9 | 12 | 86 |
| AVQWMNRLI | 1917 | 9 | 14 | 100 |
| CMSADLEVV | 1653 | 9 | 11 | 79 |
| DLCGSVFLV | 279 | 9 | 11 | 79 |
| DLEVVTSTW | 1657 | 9 | 12 | 86 |
| DLMGYIPLV | 132 | 9 | 11 | 79 |
| DLVNLLPAI | 1883 | 9 | 11 | 79 |
| DLVVICESA | 2772 | 9 | 11 | 79 |
| DLYLVTRHA | 1134 | 9 | 12 | 86 |
| DPDLSDGSW | 2410 | 9 | 11 | 79 |
| DPRRRSRNL | 111 | 9 | 12 | 86 |
| EIPFYGKAI | 1377 | 9 | 13 | 93 |
| EMGGNITRV | 2245 | 9 | 12 | 86 |
| EVVTSTWVL | 1659 | 9 | 12 | 86 |
| FISGIQYLA | 1773 | 9 | 14 | 100 |
| FLLALLSCL | 177 | 9 | 12 | 86 |
| FLLLADARV | 728 | 9 | 13 | 93 |
| FQYSPGQRV | 2646 | 9 | 11 | 79 |
| GIGTVLDQA | 1333 | 9 | 14 | 100 |
| GLPVCQDHL | 1552 | 9 | 13 | 93 |
| GLRDLAVAV | 968 | 9 | 11 | 79 |
| GLTHIDAHF | 1569 | 9 | 13 | 93 |
| GPGEGAVQW | 1912 | 9 | 12 | 86 |
| GPTPLLYRL | 1625 | 9 | 14 | 100 |
| GQIVGGVYL | 28 | 9 | 13 | 93 |
| GVAGALVAF | 1863 | 9 | 12 | 86 |
| GVLAALAAY | 1670 | 9 | 12 | 86 |
| GVNYATGNL | 161 | 9 | 11 | 79 |
| GVRVCEKMA | 2619 | 9 | 14 | 100 |
| GVRVLEDGV | 154 | 9 | 13 | 93 |
| HLHQNIVDV | 696 | 9 | 12 | 86 |
| HLPYIEQGM | 1719 | 9 | 11 | 79 |
| HMWNFISGI | 1769 | 9 | 13 | 93 |
| HQNIVDVQY | 698 | 9 | 11 | 79 |
| HVGPGEGAV | 1910 | 9 | 11 | 79 |
| ILAGYGAGV | 1856 | 9 | 11 | 79 |
| ILSPGALVV | 1891 | 9 | 13 | 93 |
| KVLVLNPSV | 1255 | 9 | 14 | 100 |
| LITSCSSNV | 2815 | 9 | 14 | 100 |
| LIVFPDLGV | 2812 | 9 | 11 | 79 |
| LLFLLLADA | 726 | 9 | 14 | 100 |
| LLFNILGGW | 1812 | 9 | 12 | 86 |

HCV B62 Super Motif (No binding data)

| | | | | |
|---|---|---|---|---|
| LLPRRGPRL | 36 | 9 | 13 | 93 |
| LPAILSPGA | 1888 | 9 | 13 | 93 |
| LPALSTGLI | 687 | 9 | 12 | 86 |
| LPCEPEPDV | 2165 | 9 | 12 | 86 |
| LPGCSFSIF | 169 | 9 | 13 | 93 |
| LVGGVLAAL | 1667 | 9 | 12 | 86 |
| LVLNPSVAA | 1257 | 9 | 14 | 100 |
| LVNLLPAIL | 1884 | 9 | 11 | 79 |
| LVTRHADVI | 1137 | 9 | 11 | 79 |
| LVVGVVCAA | 1897 | 9 | 11 | 79 |
| NILGGWVAA | 1815 | 9 | 12 | 86 |
| NIRTGVRTI | 1282 | 9 | 11 | 79 |
| NIVDVQYLY | 700 | 9 | 12 | 86 |
| NLGKVIDTL | 118 | 9 | 12 | 86 |
| NLPGCSFSI | 168 | 9 | 13 | 93 |
| NVDQDLVGW | 1108 | 9 | 11 | 79 |
| PLGGAARAL | 143 | 9 | 11 | 79 |
| PLLYRLGAV | 1628 | 9 | 13 | 93 |
| PPPSWDQMW | 1605 | 9 | 11 | 79 |
| PPVVHGCPL | 2317 | 9 | 11 | 79 |
| PQPEYDLEL | 2807 | 9 | 11 | 79 |
| PVCQDHLEF | 1554 | 9 | 12 | 86 |
| PVNSWLGNI | 2857 | 9 | 14 | 100 |
| QIVGGVYLL | 29 | 9 | 13 | 93 |
| QLSAPSLKA | 2210 | 9 | 11 | 79 |
| QPEYDLELI | 2808 | 9 | 11 | 79 |
| QPGYPWPLY | 78 | 9 | 12 | 86 |
| QPRGRRQPI | 57 | 9 | 13 | 93 |
| RLLAPITAY | 1029 | 9 | 12 | 86 |
| RMILMTHFF | 2875 | 9 | 12 | 86 |
| RVCEKMALY | 2621 | 9 | 14 | 100 |
| RVESENKVV | 2252 | 9 | 12 | 86 |
| RVLEDGVNY | 156 | 9 | 12 | 86 |
| SMLTDPSHI | 2178 | 9 | 14 | 100 |
| SPGALVVGV | 1893 | 9 | 13 | 93 |
| SPGEINRVA | 2931 | 9 | 11 | 79 |
| SPGQRVEFL | 2649 | 9 | 11 | 79 |
| SPRGSRPSW | 99 | 9 | 11 | 79 |
| SVIDCNTCV | 1455 | 9 | 12 | 86 |
| TIMAKNEVF | 2590 | 9 | 11 | 79 |
| TLHGPTPLL | 1622 | 9 | 11 | 79 |
| TLPALSTGL | 686 | 9 | 11 | 79 |
| TLTCGFADL | 125 | 9 | 12 | 86 |
| TLWARMILM | 2871 | 9 | 11 | 79 |
| TPLLYRLGA | 1627 | 9 | 13 | 93 |

HCV B62 Super Motif

| | | | | | |
|---|---|---|---|---|---|
| TVLDQAETA | 1336 | | 9 | 14 | 100 |
| VIDTLTCGF | 122 | | 9 | 12 | 86 |
| VLEDGVNYA | 157 | | 9 | 12 | 86 |
| VLVDILAGY | 1852 | | 9 | 11 | 79 |
| VLVGGVLAA | 1666 | 24.0075 | 9 | 12 | 86 |
| VLVLNPSVA | 1256 | 24.0072 | 9 | 14 | 100 |
| VQWMNRLIA | 1918 | | 9 | 14 | 100 |
| VVGVVCAAI | 1898 | | 9 | 11 | 79 |
| VVTSTWVLV | 1660 | 1.0823 | 9 | 12 | 86 |
| WMNRLIAFA | 1920 | 24.0073 | 9 | 14 | 100 |
| WVLVGGVLA | 1665 | 40.0075 | 9 | 12 | 86 |
| YIPLVGAPL | 136 | 1.0817 | 9 | 11 | 79 |
| YLVAYQATV | 1590 | 1.0127 | 9 | 12 | 86 |
| YLVTRHADV | 1136 | 1.0119 | 9 | 12 | 86 |
| YQATVCARA | 1594 | | 9 | 13 | 93 |
| YVGDLCGSV | 276 | 1.0100 | 9 | 12 | 86 |
| YVGGVEHRL | 637 | 1.0107 | 9 | 13 | 93 |
| YVPESDAAA | 1939 | | 9 | 12 | 86 |
| AILSPGALVV | 1890 | 24.0101 | 10 | 12 | 86 |
| ALVVGVVCAA | 1896 | | 10 | 11 | 79 |
| APPPSWDOMW | 1604 | 15.0233 | 10 | 11 | 79 |
| APTLWARMIL | 2869 | 15.0247 | 10 | 11 | 79 |
| AQPGYPWPLY | 77 | | 10 | 12 | 86 |
| AVAYYRGLDV | 1419 | 1.0486 | 10 | 14 | 100 |
| AVCTRGVAKA | 1188 | | 10 | 11 | 79 |
| AVQWMNRLIA | 1917 | | 10 | 14 | 100 |
| CLRKLGVPPL | 2941 | 1.0510 | 10 | 12 | 86 |
| CVTQTVDFSL | 1462 | 1.0487 | 10 | 12 | 86 |
| DILAGYGAGV | 1855 | 1.0495 | 10 | 11 | 79 |
| DLEVVTSTWV | 1857 | 1.0490 | 10 | 12 | 86 |
| DLGVRVCEKM | 2617 | | 10 | 13 | 93 |
| DLSDGSWSTV | 2412 | 1.0499 | 10 | 11 | 79 |
| DLVNLLPAIL | 1883 | 1.0891 | 10 | 11 | 79 |
| DQAETAGARL | 1339 | | 10 | 12 | 86 |
| DVKFPGGGQI | 21 | 1174.01 | 10 | 12 | 86 |
| ELITSCSSNV | 2814 | 1.0506 | 10 | 14 | 100 |
| EQFKCKALGL | 1731 | | 10 | 12 | 86 |
| EVVTSTWVLV | 1659 | 1.0491 | 10 | 12 | 86 |
| GLSAFSLHSY | 2921 | 1.0509 | 10 | 11 | 79 |
| GLSTLPGNPA | 1782 | | 10 | 14 | 100 |
| GLTHIDAHFL | 1569 | 1.0488 | 10 | 13 | 93 |
| GPGEGAVQWM | 1912 | 15.0240 | 10 | 12 | 86 |
| GQIVGGVYLL | 28 | | 10 | 13 | 93 |
| GVCWTVYHGA | 1081 | | 10 | 11 | 79 |
| GVRVCEKMAL | 2619 | 1.0504 | 10 | 14 | 100 |
| HQNIVDVQYL | 698 | | 10 | 11 | 79 |
| ILAGYGAGVA | 1856 | | 10 | 11 | 79 |
| ILGGWVAAQL | 1816 | | 10 | 12 | 86 |
| IMAKNEVFCV | 2591 | | 10 | 11 | 79 |
| IQYLAGLSTL | 1777 | | 10 | 14 | 100 |
| IVFPDLGVRV | 2613 | | 10 | 11 | 79 |
| KPTLHGPTPL | 1620 | | 10 | 11 | 79 |
| KVIDTLTCGF | 121 | | 10 | 12 | 86 |
| KVLVLNPSVA | 1255 | | 10 | 14 | 100 |
| LLFNILGGWV | 1812 | | 10 | 12 | 86 |
| LLPAILSPGA | 1887 | | 10 | 13 | 93 |
| LMGYIPLVGA | 133 | | 10 | 11 | 79 |
| LPAILSPGAL | 1888 | | 10 | 13 | 93 |
| LPGCSFSIFL | 169 | | 10 | 13 | 93 |
| LPRRGPRLGV | 37 | | 10 | 13 | 93 |
| LPVCQDHLEF | 1553 | | 10 | 12 | 86 |
| LVAYQATVCA | 1591 | | 10 | 12 | 86 |
| LVDILAGYGA | 1853 | | 10 | 11 | 79 |
| LVGGVLAALA | 1667 | | 10 | 12 | 86 |
| LVVGVVCAAI | 1897 | | 10 | 11 | 79 |
| MLTDPSHITA | 2179 | | 10 | 14 | 100 |
| NLPGCSFSIF | 168 | | 10 | 13 | 93 |
| NPSVAATLGF | 1260 | | 10 | 14 | 100 |
| PITYSTYGKF | 1295 | | 10 | 11 | 79 |
| PLGGAARALA | 143 | | 10 | 11 | 79 |
| PQPEYDLELI | 2807 | | 10 | 11 | 79 |
| PVCQCHLEFW | 1554 | | 10 | 12 | 86 |
| PVNSWLGNII | 2857 | | 10 | 14 | 100 |
| PVYCFTPSPV | 508 | | 10 | 13 | 93 |
| QLPCEPEPDV | 2164 | | 10 | 12 | 86 |
| QPEKGGRKPA | 2601 | | 10 | 11 | 79 |
| RLHGLSAFSL | 2918 | | 10 | 11 | 79 |
| RLIVFPDLGV | 2611 | | 10 | 11 | 79 |
| RMAWDMMMNW | 317 | | 10 | 12 | 86 |
| RVLEDGVNYA | 156 | | 10 | 12 | 86 |
| SLHSYSPGEI | 2926 | | 10 | 11 | 79 |
| SLTGRDKNQV | 1051 | | 10 | 12 | 86 |
| SPGALVVGVV | 1893 | | 10 | 11 | 79 |
| SQLSAPSLKA | 2209 | | 10 | 11 | 79 |
| SQPRGRRQPI | 56 | | 10 | 13 | 93 |
| SVAATLGFGA | 1262 | | 10 | 14 | 100 |
| TLHGPTPLLY | 1622 | | 10 | 11 | 79 |
| TLLFNILGGW | 1811 | | 10 | 12 | 86 |
| TLPALSTGLI | 686 | | 10 | 11 | 79 |
| TLTCGFADLM | 125 | | 10 | 12 | 86 |
| TPCTCGSSDL | 1125 | | 10 | 11 | 79 |
| TPLLYRLGAV | 1627 | | 10 | 13 | 93 |
| TPVNSWLGNI | 2856 | | 10 | 12 | 86 |
| TVDFSLDPTF | 1466 | | 10 | 12 | 86 |
| VIDTLTCGFA | 122 | | 10 | 12 | 86 |
| VLAALAAYCL | 1871 | | 10 | 12 | 86 |
| VLDQAETAGA | 1337 | | 10 | 12 | 86 |
| VLNPSVAATL | 1258 | | 10 | 14 | 100 |
| VLTTSCGNTL | 2737 | | 10 | 11 | 79 |
| VLVGGVLAAL | 1666 | | 10 | 12 | 86 |
| VLVLNPSVAA | 1256 | | 10 | 14 | 100 |
| VMGSSYGFQY | 2639 | | 10 | 11 | 79 |
| VPESDAAARV | 1940 | | 10 | 12 | 86 |
| VQWMN$$LIAF | 1918 | | 10 | 14 | 100 |
| VVGVVCAAIL | 1898 | | 10 | 11 | 79 |
| WVLVGGVLAA | 1665 | | 10 | 12 | 86 |
| YLKGSSGGPL | 1165 | | 10 | 12 | 86 |
| YLLPRRGPRL | 35 | | 10 | 13 | 93 |
| YLVTRHADVI | 1136 | | 10 | 11 | 79 |
| YVGDLCGSVF | 276 | | 10 | 12 | 86 |
| ALVVGVVCAAI | 1896 | | 11 | 11 | 79 |
| APTGSGKSTKV | 1235 | | 11 | 13 | 93 |
| APTLWARMILM | 2869 | | 11 | 11 | 79 |
| AQAPPPSWDQM | 1502 | | 11 | 12 | 86 |
| AVCTRGVAKAV | 1188 | | 11 | 11 | 79 |
| AVQWMNRLIAF | 1917 | | 11 | 14 | 100 |
| DILAGYGAGVA | 1855 | | 11 | 11 | 79 |
| DLEVVTSTWVL | 1657 | | 11 | 12 | 86 |
| DLGVRVCEKMA | 2617 | | 11 | 13 | 93 |
| DLMGYIPLVGA | 132 | | 11 | 11 | 79 |
| DLYLVTRHADV | 1134 | | 11 | 12 | 86 |
| DQAETAGARLV | 1339 | | 11 | 12 | 86 |
| DVKFPGGGQIV | 21 | | 11 | 12 | 86 |
| EQFKQKALGLL | 1731 | | 11 | 12 | 86 |
| FISGIQYLAGL | 1773 | | 11 | 14 | 100 |
| FLADGGCSGGA | 1304 | | 11 | 11 | 79 |
| FPGGGQIVGGV | 24 | | 11 | 14 | 100 |
| FQYSPGQRVEF | 2646 | | 11 | 11 | 79 |
| GIQYLAGLSTL | 1776 | | 11 | 14 | 100 |
| GLPVQQDHLEF | 1552 | | 11 | 12 | 86 |
| GLSTLPGNPAI | 1782 | | 11 | 11 | 79 |
| GPTPLLYRLGA | 1625 | | 11 | 13 | 93 |
| GPVYCFTPSPV | 507 | | 11 | 13 | 93 |
| GVLAALAAYCL | 1670 | | 11 | 12 | 86 |
| GVRVCEKMALY | 2619 | | 11 | 14 | 100 |
| GVRVLEDGVNY | 154 | | 11 | 12 | 86 |
| HLHQNIVDVQY | 696 | | 11 | 11 | 79 |
| HMWNFISGIQY | 1769 | | 11 | 13 | 93 |
| HQNIVDYQYLY | 698 | | 11 | 11 | 79 |
| HVGPGEGAVQW | 1910 | | 11 | 11 | 79 |
| ILGGWVAAQLA | 1816 | | 11 | 12 | 86 |
| ILGIGTVLDQA | 1331 | | 11 | 12 | 86 |
| ILSPGALVVGV | 1891 | | 11 | 13 | 93 |
| KPARLIVFPDL | 2608 | | 11 | 11 | 79 |
| KPTLHGPTPLL | 1620 | | 11 | 11 | 79 |
| KQKALGLLQTA | 1734 | | 11 | 12 | 86 |
| KVIDTLTCGFA | 121 | | 11 | 12 | 86 |
| KVLVLNPSVAA | 1255 | | 11 | 14 | 100 |
| LIAFASRGNHV | 1924 | | 11 | 14 | 100 |
| LITSCSSNVSV | 2815 | | 11 | 14 | 100 |
| LIVFPDLGVRV | 2612 | | 11 | 11 | 79 |
| LLFLLLADARV | 726 | | 11 | 13 | 93 |
| LLFNILGGWVA | 1812 | | 11 | 12 | 86 |
| LLPAILSPGAL | 1887 | | 11 | 13 | 93 |
| LLPRRGPRLGV | 36 | | 11 | 13 | 93 |
| LLSPRGSRPSW | 97 | | 11 | 11 | 79 |
| LLWRQEMGGNI | 2240 | | 11 | 12 | 86 |
| LPAILSPGALV | 1888 | | 11 | 12 | 86 |
| LPALSTGLIHL | 687 | | 11 | 12 | 86 |
| LPGCSFSIFLL | 169 | | 11 | 13 | 93 |
| LPVCQDHLEFW | 1553 | | 11 | 12 | 86 |
| LVGGVLAALAA | 1667 | | 11 | 12 | 86 |
| LVLNPSVAATL | 1257 | | 11 | 14 | 100 |
| LVTRHADVIPV | 1137 | | 11 | 11 | 79 |
| LVVGVVCAAIL | 1897 | | 11 | 11 | 79 |
| NILGGWVAAQL | 1815 | | 11 | 12 | 86 |
| NITRVESENKV | 2249 | | 11 | 12 | 86 |
| NLLPAILSPGA | 1886 | | 11 | 13 | 93 |
| NLPGCSFSIFL | 168 | | 11 | 13 | 93 |
| PITYSTYGKFL | 1295 | | 11 | 11 | 79 |
| PLEGEPGDPDL | 2403 | | 11 | 13 | 93 |
| PMGFSYDTRCF | 2667 | | 11 | 11 | 79 |
| PPSWDQMWKCL | 1606 | | 11 | 11 | 79 |
| PVNSWLGNIIM | 2857 | | 11 | 12 | 86 |
| PVYCFTPSPVV | 508 | | 11 | 13 | 93 |
| RMYVGGVEHRL | 635 | | 11 | 13 | 93 |
| RQEMGGNITRV | 2243 | | 11 | 12 | 86 |
| RVCEKMALYDV | 2621 | | 11 | 12 | 86 |
| SIFLLALLSCL | 175 | | 11 | 12 | 86 |
| SMLTDPSHITA | 2178 | | 11 | 14 | 100 |
| SPTHYVPESDA | 1935 | | 11 | 12 | 86 |
| SQLPCEPEPDV | 2163 | | 11 | 12 | 86 |
| SVAATLGFGAY | 1262 | | 11 | 14 | 100 |
| TLGFGAYMSKA | 1266 | | 11 | 12 | 86 |
| TLLFNILGGWV | 1811 | | 11 | 12 | 86 |
| TPCTCGSSDLY | 1126 | | 11 | 11 | 79 |
| TPGLPVCQDHL | 1550 | | 11 | 13 | 93 |
| TPVNSWLGNII | 2856 | | 11 | 12 | 86 |
| TVLDQAETAGA | 1336 | | 11 | 12 | 86 |
| VLCECYDAGCA | 1521 | | 11 | 11 | 79 |
| VLVDILAGYGA | 1852 | | 11 | 11 | 79 |
| VLVGGVLAALA | 1666 | | 11 | 12 | 86 |
| VQPEKGGRKPA | 2600 | | 11 | 11 | 79 |
| VQWMNRLIAFA | 1918 | | 11 | 14 | 100 |
| VVCAAILRRHV | 1901 | | 11 | 11 | 79 |
| WVLVGGVLAAL | 1665 | | 11 | 12 | 86 |
| YLKGSSGGPLL | 1165 | | 11 | 12 | 86 |
| YLVAYQATVCA | 1590 | | 11 | 12 | 86 |
| YQATVCARAQA | 1594 | | 11 | 11 | 79 |
| YVGDLCGSVFL | 276 | | 11 | 12 | 86 |
| YVPESDAAARV | 1939 | | 11 | 12 | 86 |
| 426 | | | | | |

TABLE XV
HCV A01 Motif with Binding Information

| | | | | | |
|---|---|---|---|---|---|
| | | No. of | Sequence | Conservancy | |
| Sequence | Position | Amino Acids | Frequency | (%) | A*0101 |

| | | | | | | |
|---|---|---|---|---|---|---|
| ASFCGSPY | 166 | 26.0026 | 8 | 20 | 100 | |
| DNSVVLSRKY | 737 | 20.0255 | 10 | 18 | 90 | 0.0001 |
| FAAPFTQCGY | 631 | 20.0254 | 10 | 19 | 95 | 0.0680 |
| GFAAPFTQCGY | 630 | | 11 | 19 | 95 | |
| GRETVLEY | 140 | | 8 | 15 | 75 | |
| GYSLNFMGY | 579 | 2.0058 | 9 | 17 | 85 | |
| HTLWKAGILY | 149 | 1069.04 | 10 | 20 | 100 | 0.1100 |
| KQAFTFSPTY | 653 | 20.0256 | 10 | 19 | 95 | 0.0001 |
| LLDTASALY | 30 | 1069.01 | 9 | 17 | 85 | 12.0000 |
| LSLDVSAAFY | 415 | 1090.07 | 10 | 19 | 95 | 0.0150 |
| LTFGRETVLEY | 137 | | 11 | 15 | 75 | |
| MMWYWGPSLY | 360 | 1039.01 | 10 | 17 | 85 | 0.0810 |
| MSTTDLEAY | 103 | 2.0126 | 9 | 15 | 75 | 0.8500 |
| NSVVLSRKY | 738 | 2.0123 | 9 | 18 | 90 | 0.0005 |
| PLDKGIKPY | 124 | 1147.12 | 9 | 20 | 100 | |
| PLDKGIKPYY | 124 | 1069.03 | 10 | 20 | 100 | 0.1700 |
| PTTGRTSLY | 797 | 1090.09 | 9 | 17 | 85 | 0.2100 |
| SASFCGSPY | 165 | | 9 | 20 | 100 | |
| SLDVSAAFY | 416 | 1069.02 | 9 | 19 | 95 | 5.2000 |
| STTDLEAY | 104 | | 8 | 15 | 75 | |
| TTGRTSLY | 798 | 26.0030 | 8 | 17 | 85 | |
| WLSLDVSAAFY | 414 | 26.0551 | 11 | 19 | 95 | |
| WMMWYWGPS | 359 | 1039.06 | 11 | 17 | 85 | 0.3200 |
| YPALMPLY | 640 | 19.0014 | 8 | 19 | 95 | |
| YSLNFMGY | 580 | 26.0032 | 8 | 17 | 85 | |
| 25 | | | | | | |

TABLE XVI
HCV A03 Motif with Binding Information

| | | | | | |
|---|---|---|---|---|---|
| | | No. of | Sequence | Conservancy | |
| Sequence | Position | Amino Acids | Frequency | (%) | A*0301 |

| | | | | | | |
|---|---|---|---|---|---|---|
| AACNWTRGER | 647 | | 10 | 12 | 86 | 0.0003 |
| AARALAHGVR | 147 | | 10 | 11 | 79 | |
| AATLGFGA | 1264 | | 8 | 14 | 100 | |
| AATLGFGAY | 1264 | | 9 | 14 | 100 | |
| AAVCTRGVA | 1187 | | 9 | 11 | 79 | |
| AAVCTRGVAK | 1187 | | 10 | 11 | 79 | |
| AAVCTRGVAKA | 1187 | | 11 | 11 | 79 | |
| ACNWTRGER | 648 | | 9 | 12 | 86 | |
| ADGGCSGGA | 1306 | | 9 | 11 | 79 | |
| ADGGCSGGAY | 1306 | | 10 | 11 | 79 | |
| ADVIPVRR | 1142 | | 8 | 12 | 86 | |
| ADVIPVRRR | 1142 | | 9 | 11 | 79 | |
| AFASRGNH | 1926 | | 8 | 14 | 100 | |
| AGALVAFK | 1865 | | 8 | 12 | 86 | |
| AGARLVVLA | 1344 | | 9 | 12 | 86 | |
| AGARLVVLATA | 1344 | | 11 | 11 | 79 | |
| AGLSTLPGNPA | 1781 | | 11 | 14 | 100 | |
| AGVAGALVA | 1862 | | 9 | 12 | 86 | |
| AGVAGALVAF | 1862 | | 10 | 12 | 86 | |
| AGVAGALVAFK | 1862 | | 11 | 12 | 86 | |
| AGWLLSPR | 94 | | 8 | 12 | 86 | |
| AGWLLSPRGSR | 94 | | 11 | 12 | 86 | |
| AGYGAGVA | 1858 | | 8 | 12 | 86 | |
| AGYGAGVAGA | 1858 | | 10 | 12 | 86 | |
| ALGLLQTA | 1737 | | 8 | 12 | 86 | |
| ALSTGLIH | 689 | | 8 | 12 | 86 | |
| ALSTGLIHLH | 689 | | 10 | 12 | 86 | 0.0003 |
| ALVVGVVCA | 1896 | | 9 | 11 | 79 | |
| ALVVGVVCAA | 1896 | | 10 | 11 | 79 | |
| ASLMAFTA | 1793 | | 8 | 11 | 79 | |
| ASQLSAPSLK | 2208 | | 10 | 11 | 79 | |
| ASQLSAPSLKA | 2208 | | 11 | 11 | 79 | |
| ASRGNHVSPTH | 1928 | | 11 | 12 | 86 | |
| ASSSASQLSA | 2204 | | 10 | 14 | 100 | |
| ATGNLPGCSF | 165 | | 10 | 13 | 93 | |
| ATLGFGAY | 1265 | | 8 | 14 | 100 | |
| ATLGFGAYMSK | 1265 | | 11 | 12 | 86 | |
| ATRKTSER | 48 | | 8 | 11 | 79 | |
| ATVCARAQA | 1596 | | 9 | 11 | 79 | |
| AVCTRGVA | 1188 | | 8 | 11 | 79 | |
| AVCTRGVAK | 1188 | | 9 | 11 | 79 | 0.0260 |
| AVCTRGVAKA | 1188 | | 10 | 11 | 79 | |
| AVQWMNRLIA | 1917 | | 10 | 14 | 100 | |
| AVQWMNRLIAF | 1917 | | 11 | 14 | 100 | |
| CAAILRRH | 1903 | | 8 | 13 | 93 | |
| CAWYELTPA | 1530 | | 9 | 11 | 79 | |
| CGFADLMGY | 128 | | 9 | 13 | 93 | |
| CGNTLTCY | 2742 | | 8 | 11 | 79 | |
| CGSSDLYLVTR | 1130 | | 11 | 11 | 79 | |
| CGYRRCRA | 2727 | | 8 | 14 | 100 | |
| CLRKLGVPPLR | 2941 | | 11 | 12 | 86 | |
| CSFSIFLLA | 172 | | 9 | 14 | 100 | |
| CSSNVSVA | 2819 | | 8 | 14 | 100 | |
| CSSNVSVAH | 2819 | | 9 | 12 | 86 | |
| CTCGSSDLY | 1128 | | 9 | 11 | 79 | 0.0001 |
| CTRGVAKA | 1190 | | 8 | 11 | 79 | |
| CTRGVAKAVDF | 1190 | | 11 | 11 | 79 | |
| CTWMNSTGF | 555 | | 9 | 11 | 79 | |
| CTWMNSTGFTK | 555 | | 11 | 11 | 79 | 0.7600 |
| CVQPEKGGR | 2599 | | 9 | 11 | 79 | 0.0008 |
| CVQPEKGGRK | 2599 | | 10 | 11 | 79 | 0.0011 |
| CVTQTVDF | 1462 | | 8 | 12 | 86 | |
| DAHFLSQTK | 1574 | | 9 | 14 | 100 | 0.0003 |
| DDLVVICESA | 2771 | | 10 | 11 | 79 | |
| DFSLDPTF | 1468 | | 8 | 14 | 100 | |
| DGGCSGGA | 1307 | | 8 | 11 | 79 | |
| DGGCSGGAY | 1307 | | 9 | 11 | 79 | |
| DIIICDECH | 1316 | | 9 | 12 | 86 | |
| DILAGYGA | 1855 | | 8 | 12 | 86 | |
| DILAGYGAGVA | 1855 | | 11 | 11 | 79 | |
| DLGVRVCEK | 2617 | | 9 | 13 | 93 | 0.0003 |
| DLGVRVCEKMA | 2617 | | 11 | 13 | 93 | |
| DLMGYIPLVGA | 132 | | 11 | 11 | 79 | |
| DLVNLLPA | 1883 | | 8 | 11 | 79 | |
| DLVVICESA | 2772 | | 9 | 11 | 79 | |
| DLYLVTRH | 1134 | | 8 | 12 | 86 | |
| DLYLVTRHA | 1134 | | 9 | 12 | 86 | 0.0003 |
| DTLTCGFA | 124 | | 8 | 12 | 86 | |
| DVIPVRRR | 1143 | | 8 | 11 | 79 | |
| EAMTRYSA | 2794 | | 8 | 14 | 100 | |
| ECYDAGCA | 1524 | | 8 | 11 | 79 | |
| ECYDAGCAWY | 1524 | | 10 | 11 | 79 | |
| EDLVNLLPA | 1882 | | 9 | 11 | 79 | |
| EGAVQWMNR | 1915 | | 9 | 14 | 100 | 0.0004 |
| EIPFYGKA | 1377 | | 8 | 13 | 93 | |
| EMGGNITR | 2245 | | 8 | 12 | 86 | |
| ETAGARLVVLA | 1342 | | 11 | 12 | 86 | |
| ETTMRSPVF | 1207 | | 9 | 12 | 86 | |
| EVFCVQPEK | 2596 | | 9 | 12 | 86 | 0.0008 |
| FCVQPEKGGR | 2598 | | 10 | 11 | 79 | |
| FCVQPEKGGRK | 2590 | | 11 | 11 | 79 | |
| FGAYMSKA | 1269 | | 8 | 12 | 86 | |
| FGAYMSKAH | 1269 | | 9 | 12 | 86 | |
| FGCTWMNSTGF | 553 | | 11 | 11 | 79 | |
| FGYGAKDVR | 2554 | | 9 | 12 | 86 | 0.0008 |
| FISGIQYLA | 1773 | | 9 | 14 | 100 | |
| FLADGGCSGGA | 1304 | | 11 | 11 | 79 | |
| FLLLADAR | 728 | | 8 | 14 | 100 | |
| FSYDTRCF | 2670 | | 8 | 11 | 79 | |
| FTEAMTRY | 2792 | | 8 | 14 | 100 | |
| FTEAMTRYSA | 2792 | | 10 | 14 | 100 | |
| FTGLTHIDA | 1567 | | 9 | 13 | 93 | |
| FTGLTHIDAH | 1567 | | 10 | 13 | 93 | |
| FTGLTHIDAHF | 1567 | | 11 | 13 | 93 | |
| GAARALAH | 146 | | 8 | 11 | 79 | |
| GAARALAHGVR | 146 | | 11 | 11 | 79 | |
| GAGVAGALVA | 1861 | | 10 | 12 | 86 | |
| GAGVAGALVAF | 1861 | | 11 | 12 | 86 | |
| GAHWGVLA | 350 | | 8 | 12 | 86 | |
| GALVVGVVCA | 1895 | | 10 | 11 | 79 | |
| GALVVGVVCAA | 1895 | | 11 | 11 | 79 | |
| GARLVVLA | 1345 | | 8 | 12 | 86 | |
| GARLVVLATA | 1345 | | 10 | 11 | 79 | |
| GAVQWMNR | 1916 | | 8 | 14 | 100 | |
| GAVQWMNRLIA | 1916 | | 11 | 14 | 100 | |
| GAYMSKAH | 1270 | | 8 | 12 | 86 | |
| GCAWYELTPA | 1529 | | 10 | 11 | 79 | |
| GCSFSIFLLA | 171 | | 10 | 14 | 100 | |
| GCTWMNSTGF | 554 | | 10 | 11 | 79 | |
| GDDLVVICESA | 2770 | | 11 | 11 | 79 | |
| GDLCGSVF | 278 | | 8 | 12 | 86 | |
| GFADLMGY | 129 | | 8 | 13 | 93 | |
| GFGAYMSK | 1268 | | 8 | 12 | 86 | |
| GFGAYMSKA | 1268 | | 9 | 12 | 86 | |
| GFGAYMSKAH | 1268 | | 10 | 12 | 86 | |
| GFQYSPGQR | 2645 | | 9 | 11 | 79 | |
| GFSYDTRCF | 2669 | | 9 | 11 | 79 | |
| GGAARALA | 145 | | 8 | 11 | 79 | |
| GGAARALAH | 145 | | 9 | 11 | 79 | |
| GGCSGGAY | 1308 | | 8 | 11 | 79 | |
| GGGQVGGVY | 26 | | 10 | 14 | 100 | |
| GGHYVQMA | 935 | | 8 | 11 | 79 | |
| GGQVGGVY | 27 | | 9 | 14 | 100 | |
| GGRHUFCH | 1392 | | 9 | 14 | 100 | 0.0003 |
| GGRHUFCHSK | 1392 | | 11 | 14 | 100 | |
| GGRKPARLIVF | 2605 | | 11 | 11 | 79 | |
| GGVLAALA | 1669 | | 8 | 12 | 86 | |
| GGVLAALAA | 1669 | | 9 | 12 | 86 | |
| GGVLAALAAY | 1669 | | 10 | 12 | 86 | |
| GGVYLLPR | 32 | | 8 | 13 | 93 | |
| GGVYLLPRR | 32 | | 9 | 13 | 93 | 0.0003 |
| GGWVAAQLA | 1818 | | 9 | 12 | 86 | |
| GIGTVLDQA | 1333 | | 9 | 14 | 100 | |
| GIYLLPNR | 3037 | | 8 | 11 | 79 | |
| GLPVCQDH | 1552 | | 8 | 13 | 93 | |
| GLPVCQDHLEF | 1552 | | 11 | 12 | 86 | |
| GLPVSARR | 1004 | | 8 | 11 | 79 | |
| GLRDLAVA | 968 | | 8 | 11 | 79 | |
| GLSAFSLH | 2921 | | 8 | 11 | 79 | |
| GLSAFSLHSY | 2921 | | 10 | 11 | 79 | 0.0100 |
| GLSTLPGNPA | 1782 | | 10 | 14 | 100 | |
| GLTHIDAH | 1569 | | 8 | 13 | 93 | |
| GLTHIDAHF | 1569 | | 9 | 13 | 93 | |
| GSGKSTKVPA | 1238 | | 10 | 12 | 86 | |
| GSGKSTKVPAA | 1238 | | 11 | 12 | 86 | |
| GSSDLYLVTR | 1131 | | 10 | 12 | 86 | |
| GSSDLYLVTRH | 1131 | | 11 | 12 | 86 | |
| GSSYGFQY | 2641 | | 8 | 11 | 79 | |
| GTFPINAY | 2063 | | 8 | 11 | 79 | |
| GTVLDQAETA | 1335 | | 10 | 14 | 100 | |
| GVAGALVA | 1863 | | 8 | 12 | 86 | |
| GVAGALVAF | 1863 | | 9 | 12 | 86 | |
| GVAGALVAFK | 1863 | | 10 | 12 | 86 | 0.3900 |
| GVAKAVDF | 1193 | | 8 | 11 | 79 | |
| GVCWTVYH | 1081 | | 8 | 11 | 79 | |
| GVCWTVYHGA | 1081 | | 10 | 11 | 79 | |
| GVGIYLLPNR | 3035 | | 10 | 11 | 79 | 0.0014 |
| GVLAALAA | 1670 | | 8 | 12 | 86 | |
| GVLAALAAY | 1670 | | 9 | 12 | 86 | 0.0046 |
| GVRATRKTSER | 45 | | 11 | 11 | 79 | |
| GVRVCEKMA | 2619 | | 9 | 14 | 100 | |
| GVRVCEKMALY | 2619 | | 11 | 14 | 100 | |
| GVRVLEDGVNY | 154 | | 11 | 12 | 86 | |
| GVVCAAILR | 1900 | | 9 | 11 | 79 | |
| GVVCAAILRR | 1900 | | 10 | 11 | 79 | |
| GVVCAAILRRH | 1900 | | 11 | 11 | 79 | |
| GVYLLPRR | 33 | | 8 | 13 | 93 | |
| GVYLLPRRGPR | 33 | | 11 | 13 | 93 | |
| HADVIPVR | 1141 | | 8 | 11 | 79 | |
| HADVIPVRR | 1141 | | 9 | 11 | 79 | |
| HADVIPVRRR | 1141 | | 10 | 11 | 79 | |
| HAPTGSGK | 1234 | | 8 | 14 | 100 | |
| HAPTGSGKSTK | 1234 | | 11 | 13 | 93 | |
| HGLSAFSLH | 2920 | | 9 | 11 | 79 | |
| HGLSAFSLHSY | 2920 | | 11 | 11 | 79 | |
| HGPTPLLY | 1624 | | 8 | 11 | 79 | |
| HGPTPLLYR | 1624 | | 9 | 11 | 79 | |
| HIDAHFLSQTK | 1572 | | 11 | 14 | 100 | |
| HLHAPTGSGK | 1232 | | 10 | 12 | 86 | 0.5900 |
| HLHQNIVDVQY | 696 | | 11 | 11 | 79 | |
| HLIFCHSK | 1395 | | 8 | 14 | 100 | |
| HLIFCHSKK | 1395 | | 9 | 14 | 100 | 0.0250 |
| HLIFCHSKKK | 1395 | | 10 | 14 | 100 | 0.0260 |
| HMWNFISGIQY | 1769 | | 11 | 13 | 93 | |
| HSKKKCDELA | 1400 | | 10 | 14 | 100 | |
| HSKKKCDELAA | 1400 | | 11 | 14 | 100 | |
| HSYSPGEINR | 2928 | | 10 | 11 | 79 | |
| HTPGCVPCVR | 222 | | 10 | 11 | 79 | 0.0004 |
| HVGPGEGA | 1910 | | 8 | 11 | 79 | |
| IAFASRGNH | 1925 | | 9 | 14 | 100 | 0.0003 |
| IDAHFLSQTK | 1573 | | 10 | 14 | 100 | |
| IDTLTCGF | 123 | | 8 | 12 | 86 | |
| IDTLTCGFA | 123 | | 9 | 12 | 86 | |
| IFCHSKKK | 1397 | | 8 | 14 | 100 | |
| IGTVLDQA | 1334 | | 8 | 14 | 100 | |
| IGTVLDQAETA | 1334 | | 11 | 14 | 100 | |
| IIICDECH | 1317 | | 8 | 12 | 86 | |
| ILAGYGAGVA | 1856 | | 10 | 11 | 79 | |
| ILGGWVAA | 1816 | | 8 | 12 | 86 | |
| ILGGWVAAQLA | 1816 | | 11 | 12 | 86 | |
| ILGIGTVLDQA | 1331 | | 11 | 12 | 86 | |
| IMAKNEVF | 2591 | | 8 | 12 | 86 | |
| ISGIQYLA | 1774 | | 8 | 14 | 100 | |
| ITRVESENK | 2250 | | 9 | 12 | 86 | 0.0150 |
| ITSCSSNVSVA | 2816 | | 11 | 14 | 100 | |
| ITWGADTA | 989 | | 8 | 12 | 86 | |
| ITWGADTAA | 989 | | 9 | 12 | 86 | |
| ITYSTYGK | 1296 | | 8 | 12 | 86 | |
| ITYSTYGKF | 1296 | | 9 | 12 | 86 | |
| ITYSTYGKFLA | 1296 | | 11 | 11 | 79 | |
| IVDVQYLY | 701 | | 8 | 12 | 86 | |
| IVFPDLGVR | 2613 | | 9 | 11 | 79 | 0.0036 |
| IVGGVYLLPR | 30 | | 10 | 13 | 93 | 0.0008 |
| IVGGVYLLPRR | 30 | | 11 | 13 | 93 | |
| KALGLLQTA | 1736 | | 9 | 12 | 86 | |
| KCDELAAK | 1404 | | 8 | 12 | 86 | |
| KFGYGAKDVR | 2553 | | 10 | 12 | 86 | |
| KGGRHLIF | 1391 | | 8 | 11 | 79 | |
| KGGRHLIFCH | 1391 | | 10 | 11 | 79 | |
| KGGRKPAR | 2604 | | 8 | 11 | 79 | |
| KLGVPPLR | 2944 | | 8 | 12 | 86 | |
| KSTKVPAA | 1241 | | 8 | 12 | 86 | |
| KSTKVPAAY | 1241 | | 9 | 12 | 86 | 0.0009 |
| KSTKVPAAYA | 1241 | | 10 | 12 | 86 | |
| KSTKVPAAYAA | 1241 | | 11 | 11 | 79 | |
| KTKRNTNR | 10 | | 8 | 12 | 86 | |
| KTKRNTNRR | 10 | | 9 | 12 | 86 | 0.0110 |
| KTSERSQPR | 51 | | 9 | 13 | 93 | 0.1600 |
| KTSERSQPRGR | 51 | | 11 | 12 | 86 | |
| KVIDTLTCGF | 121 | | 10 | 12 | 86 | |
| KVIDTLTCGFA | 121 | | 11 | 12 | 86 | |
| KVLVLNPSVA | 1255 | | 10 | 14 | 100 | |
| KVLVLNPSVAA | 1255 | | 11 | 14 | 100 | |
| KVPAAYAA | 1244 | | 8 | 11 | 79 | |
| LADGGCSGGA | 1305 | | 10 | 11 | 79 | |
| LADGGCSGGAY | 1305 | | 11 | 11 | 79 | |
| LAEQFKQK | 1729 | | 8 | 12 | 86 | |
| LAEQFKQKA | 1729 | | 9 | 12 | 86 | |
| LAGYGAGVA | 1857 | | 9 | 11 | 79 | |
| LAGYGAGVAGA | 1857 | | 11 | 11 | 79 | |
| LCECYDAGCA | 1522 | | 10 | 11 | 79 | |
| LDQAETAGA | 1338 | | 9 | 12 | 86 | |
| LDQAETAGAR | 1338 | | 10 | 12 | 86 | |
| LFLLLADA | 727 | | 8 | 14 | 100 | |
| LFLLLADAR | 727 | | 9 | 14 | 100 | |
| LFNILGGWVA | 1813 | | 10 | 12 | 86 | |
| LFNILGGWVAA | 1813 | | 11 | 12 | 86 | |
| LFTFSPRR | 290 | | 8 | 11 | 79 | |
| LGFGAYMSK | 1267 | | 9 | 12 | 86 | 0.0810 |
| LGFGAYMSKA | 1267 | | 10 | 12 | 86 | |
| LGFGAYMSKAH | 1267 | | 11 | 12 | 86 | |
| LGGAARALA | 144 | | 9 | 11 | 79 | |
| LGGAARALAH | 144 | | 10 | 11 | 79 | |
| LGGWVAAQLA | 1817 | | 10 | 12 | 86 | |
| LGIGTVLDQA | 1332 | | 10 | 13 | 93 | |
| LGVRATRK | 44 | | 8 | 12 | 86 | |
| LGVRVCEK | 2618 | | 8 | 14 | 100 | |
| LGVRVCEKMA | 2618 | | 10 | 14 | 100 | |
| LIAFASRGNH | 1924 | | 10 | 14 | 100 | |
| LIEANLLWR | 2235 | | 9 | 12 | 86 | 0.0008 |
| LIFCHSKK | 1396 | | 8 | 14 | 100 | |
| LIFCHSKKK | 1396 | | 9 | 14 | 100 | 0.5400 |
| LINTNGSWH | 414 | | 9 | 11 | 79 | |
| LIVFPDLGVR | 2612 | | 10 | 11 | 79 | 0.0003 |
| LLAPITAY | 1030 | | 8 | 14 | 100 | |
| LLFLLLADA | 726 | | 9 | 14 | 100 | 0.0016 |
| LLFLLLADAR | 726 | | 10 | 14 | 100 | |
| LLFNILGGWVA | 1812 | | 11 | 12 | 86 | |
| LLPAILSPGA | 1887 | | 10 | 13 | 93 | 0.0003 |
| LLPRRGPR | 36 | | 8 | 13 | 93 | |
| LLSPRGSR | 97 | | 8 | 12 | 86 | |
| LMGYIPLVGA | 133 | | 10 | 11 | 79 | |
| LSAFSLHSY | 2922 | | 9 | 11 | 79 | 0.0002 |
| LSAPSLKA | 2211 | | 8 | 11 | 79 | |
| LSNSLLRH | 2479 | | 8 | 12 | 86 | |
| LSNSLLRHH | 2479 | | 9 | 12 | 86 | 0.0003 |
| LSTGLIHLH | 690 | | 9 | 12 | 86 | |
| LSTLPGNPA | 1783 | | 9 | 14 | 100 | |
| LTCGFADLMGY | 126 | | 11 | 12 | 86 | |
| LTDPSHITA | 2180 | | 9 | 14 | 100 | |
| LTHIDAHF | 1570 | | 8 | 13 | 93 | |
| LTSMLTDPSH | 2176 | | 10 | 13 | 93 | |
| LVAYQATVCA | 1591 | | 10 | 12 | 86 | |
| LVAYQATVCAR | 1591 | | 11 | 11 | 79 | |
| LVDILAGY | 1853 | | 8 | 11 | 79 | |
| LVDILAGYGA | 1853 | | 10 | 11 | 79 | |
| LVGGVLAA | 1667 | | 8 | 12 | 86 | |
| LVGGVLAALA | 1667 | | 10 | 12 | 86 | |
| LVGGVLAALAA | 1667 | | 11 | 12 | 86 | |
| LVLNPSVA | 1257 | | 8 | 14 | 100 | |
| LVLNPSVAA | 1257 | | 9 | 14 | 100 | |
| LVVGVVCA | 1897 | | 8 | 11 | 79 | |
| LVVGVVCAA | 1897 | | 9 | 11 | 79 | |
| LVVICESA | 2773 | | 8 | 11 | 79 | |
| MGFSYDTR | 2668 | | 8 | 11 | 79 | |
| MGFSYDTRCF | 2668 | | 10 | 11 | 79 | |
| MGSSYGFQY | 2640 | | 9 | 11 | 79 | |
| MGYIPLVGA | 134 | | 9 | 11 | 79 | |
| MILMTHFF | 2876 | | 8 | 12 | 86 | |
| MLTDPSHITA | 2179 | | 10 | 14 | 100 | |
| MSTNPKPQR | 1 | | 9 | 11 | 79 | |
| MSTNPKPQRK | 1 | | 10 | 11 | 79 | |
| NCGYRRCR | 2726 | | 8 | 11 | 79 | |
| NCGYRRCRA | 2726 | | 9 | 11 | 79 | |
| NCSIYPGH | 305 | | 8 | 11 | 79 | |
| NFISGIQY | 1772 | | 8 | 14 | 100 | |
| NFISGIQYLA | 1772 | | 10 | 14 | 100 | |
| NGVCWTVY | 1080 | | 8 | 11 | 79 | |
| NGVCWTVYH | 1080 | | 9 | 11 | 79 | |
| NGVCWTVYHGA | 1080 | | 11 | 11 | 79 | |
| NILGGWVA | 1815 | | 8 | 12 | 86 | |
| NILGGWVAA | 1815 | | 9 | 12 | 86 | |
| NITRVESENK | 2249 | | 10 | 12 | 86 | 0.0010 |
| NIVDVQYLY | 700 | | 9 | 12 | 86 | 0.0005 |
| NLLPAILSPGA | 1886 | | 11 | 13 | 93 | |
| NLPGCSFSIF | 168 | | 10 | 13 | 93 | |
| NTCVTQTVDF | 1460 | | 10 | 12 | 86 | |
| NTNRRPQDVK | 14 | | 10 | 11 | 79 | 0.0010 |
| NTNRRPQDVKF | 14 | | 11 | 11 | 79 | |
| NTPGLPVCQDH | 1549 | | 11 | 13 | 93 | |
| PAILSPGA | 1889 | | 8 | 13 | 93 | |
| PALSTGLIH | 688 | | 9 | 12 | 86 | |
| PALSTGLIHLH | 688 | | 11 | 12 | 86 | |
| PCSGSWLR | 1976 | | 8 | 11 | 79 | |
| PCTCGSSDLY | 1127 | | 10 | 11 | 79 | |
| PDLGVRVCEK | 2616 | | 10 | 13 | 93 | |
| PGALVVGVVCA | 1894 | | 11 | 11 | 79 | |
| PGCSFSIF | 170 | | 8 | 14 | 100 | |
| PGCSFSIFLLA | 170 | | 11 | 14 | 100 | |
| PGCVPCVR | 224 | | 8 | 12 | 86 | |
| PGEGAVQWMNR | 1913 | | 11 | 13 | 93 | |
| PGEINRVA | 2932 | | 8 | 11 | 79 | |
| PGERPSGMF | 1509 | | 9 | 12 | 86 | |
| PGGGGQVGGVY | 25 | | 11 | 14 | 100 | |
| PGLPVCQDH | 1551 | | 9 | 13 | 93 | |
| PGYPWPLY | 79 | | 8 | 14 | 100 | |
| PITYSTYGK | 1295 | | 9 | 11 | 79 | |
| PITYSTYGKF | 1295 | | 10 | 11 | 79 | |
| PLGGAARA | 143 | | 8 | 11 | 79 | |
| PLGGAARALA | 143 | | 10 | 11 | 79 | |
| PLGGAARALAH | 143 | | 11 | 11 | 79 | |
| PLLYRLGA | 1628 | | 8 | 13 | 93 | |
| PMGFSYDTR | 2667 | | 9 | 11 | 79 | |
| PMGFSYDTRCF | 2667 | | 11 | 11 | 79 | |
| PSPVVVGTTDR | 514 | | 11 | 13 | 93 | |
| PSVAATLGF | 1261 | | 9 | 14 | 100 | |
| PSVAATLGFGA | 1261 | | 11 | 14 | 100 | |
| PSWDQMWK | 1607 | | 8 | 11 | 79 | |
| PTDCFRKH | 587 | | 8 | 13 | 93 | |
| PTDPRRRSR | 109 | | 9 | 12 | 86 | 0.0008 |
| PTGSGKSTK | 1236 | | 9 | 13 | 93 | 0.0002 |
| PTHYVPESDA | 1936 | | 10 | 12 | 86 | |
| PTHYVPESDAA | 1936 | | 11 | 12 | 86 | |
| PTLHGPTPLLY | 1621 | | 11 | 11 | 79 | |
| PTPLLYRLGA | 1626 | | 10 | 13 | 93 | |
| PVCQDHLEF | 1554 | | 9 | 12 | 86 | |
| PVVVGTTDR | 516 | | 9 | 13 | 93 | 0.0008 |
| QAETAGAR | 1340 | | 8 | 12 | 86 | |
| QATVCARA | 1595 | | 8 | 13 | 93 | |
| QATVCARAQA | 1595 | | 10 | 11 | 79 | |
| QIVGGVYLLPR | 29 | | 11 | 13 | 93 | |
| QLFTFSPR | 289 | | 8 | 12 | 86 | |
| QLFTFSPRR | 289 | | 9 | 11 | 79 | 0.7500 |
| QLLRIPQA | 336 | | 8 | 12 | 86 | |
| QLSAPSLK | 2210 | | 8 | 11 | 79 | |
| QLSAPSLKA | 2210 | | 9 | 11 | 79 | |
| QTVDFSLDPTF | 1465 | | 11 | 12 | 86 | |
| RAAVCTRGVA | 1186 | | 10 | 11 | 79 | |
| RAAVCTRGVAK | 1186 | | 11 | 11 | 79 | |
| RALAHGVR | 149 | | 8 | 14 | 100 | |
| RATRKTSER | 47 | | 9 | 11 | 79 | |
| RGNHVSPTH | 1930 | | 9 | 12 | 86 | 0.0003 |
| RGNHVSPTHY | 1930 | | 10 | 12 | 86 | 0.0003 |
| RGPPLGVR | 40 | | 8 | 13 | 93 | |
| RGPRLGVRA | 40 | | 9 | 13 | 93 | |
| RGPRLGVRATR | 40 | | 11 | 11 | 79 | |
| RGRRQPIPK | 59 | | 9 | 13 | 93 | 0.0120 |
| RGSLLSPR | 1154 | | 8 | 12 | 86 | |
| RGVAKAVDF | 1192 | | 8 | 11 | 79 | |
| RLGVRATR | 43 | | 8 | 11 | 79 | |
| RLGVRATRK | 43 | | 9 | 11 | 79 | 0.9400 |
| RLHGLSAF | 2918 | | 8 | 12 | 86 | |
| RLHGLSAFSLH | 2918 | | 11 | 11 | 79 | |
| RLIAFASR | 1923 | | 8 | 14 | 100 | |
| RLIAFASRGNH | 1923 | | 11 | 14 | 100 | |
| RLIVFPDLGVR | 2611 | | 11 | 11 | 79 | |
| RLLAPITA | 1029 | | 8 | 12 | 86 | |
| RLLAPITAY | 1029 | | 9 | 12 | 86 | 2.7000 |
| RLVVLATA | 1347 | | 8 | 12 | 86 | |
| RMILMTHF | 2875 | | 8 | 12 | 86 | |
| RMILMTHFF | 2875 | | 9 | 12 | 86 | |
| RMYVGGVEH | 635 | | 9 | 14 | 100 | |
| RMYVGGVEHR | 635 | | 10 | 14 | 100 | 0.7200 |
| RSQPRGRR | 55 | | 8 | 13 | 93 | |
| RVCEKMALY | 2621 | | 9 | 14 | 100 | 0.1800 |
| RVLEDGVNY | 156 | 1174.17 | 9 | 12 | 86 | 0.0120 |
| RVLEDGVNYA | 156 | | 10 | 12 | 86 | |
| SAFSLHSY | 2923 | | 8 | 11 | 79 | |
| SASQLSAPSLK | 2207 | | 11 | 11 | 79 | |
| SCSSNVSVA | 2818 | | 9 | 14 | 100 | |
| SCSSNVSVAH | 2818 | | 10 | 12 | 86 | |
| SDLYLVTR | 1133 | | 8 | 12 | 86 | |
| SDLYLVTRH | 1133 | | 9 | 12 | 86 | |
| SDLYLVTRHA | 1133 | | 10 | 12 | 86 | |
| SFSIFLLA | 173 | | 8 | 14 | 100 | |
| SGKSTKVPA | 1239 | | 9 | 12 | 86 | |
| SGKSTKVPAA | 1239 | | 10 | 12 | 86 | |
| SGKSTKVPAAY | 1239 | | 11 | 12 | 86 | |
| SMLTDPSH | 2178 | | 8 | 14 | 100 | |
| SMLTDPSHITA | 2178 | | 11 | 14 | 100 | |
| SSASQLSA | 2206 | | 8 | 14 | 100 | |
| SSDLYLVTR | 1132 | | 9 | 12 | 86 | 0.0003 |
| SSDLYLVTRH | 1132 | | 10 | 12 | 86 | 0.0003 |
| SSDLYLVTRHA | 1132 | | 11 | 12 | 86 | |
| SSNVSVAH | 2820 | | 8 | 12 | 86 | |
| SSSASQLSA | 2205 | | 9 | 14 | 100 | |
| STGLIHLH | 691 | | 8 | 12 | 86 | |
| STKVPAAY | 1242 | | 8 | 12 | 86 | |
| STKVPAAYA | 1242 | | 9 | 12 | 86 | |
| STKVPAAYAA | 1242 | | 10 | 11 | 79 | |
| STLPGNPA | 1784 | | 8 | 14 | 100 | |
| STNPKPQR | 2 | | 8 | 11 | 79 | |
| STNPKPQRK | 2 | | 9 | 11 | 79 | |
| STNPKPQRKTK | 2 | | 11 | 11 | 79 | |
| STWVLVGGVLA | 1663 | | 11 | 12 | 86 | |
| STYGKFLA | 1299 | | 8 | 12 | 86 | |
| SVAATLGF | 1262 | | 8 | 14 | 100 | |
| SVAATLGFGA | 1262 | | 10 | 14 | 100 | |
| SVAATLGFGAY | 1262 | | 11 | 14 | 100 | |
| TAGARLVVLA | 1343 | | 10 | 12 | 86 | |
| TCGFADLMGY | 127 | | 10 | 13 | 93 | |
| TCGSSDLY | 1129 | | 8 | 11 | 79 | |
| TCVTQTVDF | 1461 | | 9 | 12 | 86 | |
| TDPRRRSR | 110 | | 8 | 12 | 86 | |
| TDPSHITA | 2181 | | 8 | 14 | 100 | |
| TGEIPFYGK | 1375 | | 9 | 11 | 79 | |
| TGEIPFYGKA | 1375 | | 10 | 11 | 79 | |
| TGLTHIDA | 1568 | | 8 | 13 | 93 | |
| TGLTHIDAH | 1568 | | 9 | 13 | 93 | 0.0003 |
| TGLTHIDAHF | 1568 | | 10 | 13 | 93 | |
| TGNLPGCSF | 166 | | 9 | 13 | 93 | |
| TGSGKSTK | 1237 | | 8 | 13 | 93 | |
| TGSGKSTKVPA | 1237 | | 11 | 12 | 86 | |
| TIMAKNEVF | 2590 | | 9 | 11 | 79 | |
| TLGFGAYMSK | 1266 | | 10 | 12 | 86 | 0.0810 |
| TLGFGAYMSKA | 1266 | | 11 | 12 | 86 | |
| TLHGPTPLLY | 1622 | | 10 | 11 | 79 | 0.0890 |
| TLHGPTPLLYR | 1622 | | 11 | 11 | 79 | |
| TLPALSTGLIH | 686 | | 11 | 11 | 79 | |
| TLWARMILMTH | 2871 | | 11 | 11 | 79 | |
| TSCSSNVSVA | 2817 | | 10 | 14 | 100 | |
| TSCSSNVSVAH | 2817 | | 11 | 12 | 86 | |
| TSERSQPR | 52 | | 8 | 13 | 93 | |
| TSERSQPRGR | 52 | | 10 | 12 | 86 | 0.0003 |
| TSERSQPRGRR | 52 | | 11 | 12 | 86 | |
| TSLTGRDK | 1050 | | 8 | 12 | 86 | |
| TSMLTDPSH | 2177 | | 9 | 13 | 93 | 0.0003 |
| TTIMAKNEVF | 2589 | | 10 | 11 | 79 | |
| TTMRSPVF | 1208 | | 8 | 12 | 86 | |
| TVCARAQA | 1597 | | 8 | 11 | 79 | |
| TVDFSLDPTF | 1466 | | 10 | 12 | 86 | |
| TVLDQAETA | 1336 | | 9 | 14 | 100 | |
| TVLDQAETAGA | 1336 | | 11 | 12 | 86 | |
| VAATLGFGA | 1263 | | 9 | 14 | 100 | |
| VAATLGFGAY | 1263 | | 10 | 14 | 100 | |
| VAGALVAF | 1864 | | 8 | 12 | 86 | |
| VAGALVAFK | 1864 | | 9 | 12 | 86 | 0.2400 |
| VAYQATVCA | 1592 | | 9 | 12 | 86 | |
| VAYQATVCAR | 1592 | | 10 | 11 | 79 | 0.0005 |
| VAYQATVCARA | 1592 | | 11 | 11 | 79 | |
| VCAAILRR | 1902 | | 8 | 11 | 79 | |
| VCAAILRRH | 1902 | | 9 | 11 | 79 | |
| VCEKMALY | 2622 | | 8 | 14 | 100 | |
| VCGPVYCF | 505 | | 8 | 13 | 93 | |
| VCQDHLEF | 1555 | | 8 | 12 | 86 | |
| VCTRGVAK | 1189 | | 8 | 11 | 79 | |
| VCTRGVAKA | 1189 | | 9 | 11 | 79 | |
| VCWTVYHGA | 1082 | | 9 | 11 | 79 | |
| VDFSLDPTF | 1467 | | 9 | 14 | 100 | |
| VDILAGYGA | 1854 | | 9 | 11 | 79 | |
| VDYPYRLWH | 614 | | 9 | 13 | 93 | |
| VDYPYRLWHY | 614 | | 10 | 13 | 93 | |
| VFCVQPEK | 2597 | | 8 | 12 | 86 | |
| VFCVQPEKGGR | 2597 | | 11 | 11 | 79 | |
| VFPDLGVR | 2614 | | 8 | 11 | 79 | |
| VFTGLTHIDA | 1566 | | 10 | 13 | 93 | |
| VFTGLTHIDAH | 1566 | | 11 | 13 | 93 | |
| VGDLCGSVF | 277 | | 9 | 12 | 86 | |
| VGGVLAALA | 1668 | | 9 | 12 | 86 | |
| VGGVLAALAA | 1668 | | 10 | 12 | 86 | |
| VGGVLAALAAY | 1668 | | 11 | 12 | 86 | |
| VGGVYLLPR | 31 | | 9 | 13 | 93 | 0.0003 |
| VGGVYLLPRR | 31 | | 10 | 13 | 93 | |
| VGIYLLPNR | 3036 | | 9 | 11 | 79 | 0.0007 |
| VGVVCAAILR | 1899 | | 10 | 11 | 79 | |
| VGVVCAAILRR | 1899 | | 11 | 11 | 79 | |
| VIDTLTCGF | 122 | | 9 | 12 | 86 | |
| VIDTLTCGFA | 122 | | 10 | 12 | 86 | |
| VLAALAAY | 1671 | | 8 | 12 | 86 | |
| VLCECYDA | 1521 | | 8 | 13 | 93 | |
| VLCECYDAGCA | 1521 | | 11 | 11 | 79 | |
| VLDQAETA | 1337 | | 8 | 14 | 100 | |
| VLDQAETAGA | 1337 | | 10 | 12 | 86 | |
| VLDQAETAGAR | 1337 | | 11 | 12 | 86 | |
| VLEDGVNY | 157 | | 8 | 12 | 86 | |
| VLEDGVNYA | 157 | | 9 | 12 | 86 | |
| VLNPSVAA | 1258 | | 8 | 14 | 100 | |
| VLTSMLTDPSH | 2175 | | 11 | 13 | 93 | |
| VLVDILAGY | 1852 | | 9 | 11 | 79 | |
| VLVDILAGYGA | 1852 | | 11 | 11 | 79 | |
| VLVGGVLA | 1666 | | 8 | 12 | 86 | |
| VLVGGVLAA | 1666 | | 9 | 12 | 86 | 0.0003 |
| VLVGGVLAALA | 1666 | | 11 | 12 | 86 | |
| VLVLNPSVA | 1256 | | 9 | 14 | 100 | 0.0003 |
| VLVLNPSVAA | 1256 | | 10 | 14 | 100 | |
| VMGSSYGF | 2639 | | 8 | 11 | 79 | |
| VMGSSYGFQY | 2639 | | 10 | 11 | 79 | |
| VTRHADVIPVR | 1138 | | 11 | 11 | 79 | |
| VVCAAILR | 1901 | | 8 | 11 | 79 | |
| VVCAAILRR | 1901 | | 9 | 11 | 79 | |
| VVCAAILRRH | 1901 | | 10 | 11 | 79 | |
| VVGVVCAA | 1898 | | 8 | 11 | 79 | |
| VVGVVCAAILR | 1898 | | 11 | 11 | 79 | |
| VVVGTTDR | 517 | | 8 | 13 | 93 | |
| WAGWLLSPR | 93 | | 9 | 12 | 86 | |
| WAKHMWNF | 1766 | | 8 | 12 | 86 | |
| WAQPGYPWPLY | 76 | | 11 | 12 | 86 | |
| WARMILMTH | 2873 | | 9 | 12 | 86 | |
| WARMILMTHF | 2873 | | 10 | 12 | 86 | |
| WARMILMTHFF | 2873 | | 11 | 12 | 86 | |
| WGPTDPRR | 107 | | 8 | 12 | 86 | |
| WGPTDPRRR | 107 | | 9 | 12 | 86 | |
| WGPTDPRRRSR | 107 | | 11 | 12 | 86 | |
| WLLSPRGSR | 96 | | 9 | 12 | 86 | 0.0008 |
| WMNRLIAF | 1920 | | 8 | 14 | 100 | |
| WMNRLIAFA | 1920 | | 9 | 14 | 100 | 0.0003 |
| WMNRLIAFASR | 1920 | | 11 | 14 | 100 | |
| WMNSTGFTK | 557 | | 9 | 11 | 79 | 0.0530 |
| WVLVGGVLA | 1665 | | 9 | 12 | 86 | |
| WVLVGGVLAA | 1665 | | 10 | 12 | 86 | |
| YATGNLPGCSF | 164 | | 11 | 12 | 86 | |
| YDAGCAWY | 1526 | | 8 | 11 | 79 | |
| YDIIICDECH | 1315 | | 10 | 12 | 86 | |
| YGAGVAGA | 1860 | | 8 | 12 | 86 | |
| YGAGVAGALVA | 1860 | | 11 | 12 | 86 | |
| YGFQYSPGCR | 2644 | | 10 | 11 | 79 | |
| YLLPRRGPR | 35 | | 9 | 13 | 93 | 0.0054 |
| YLVAYQATVCA | 1590 | | 11 | 12 | 86 | |
| YSPGEINR | 2930 | | 8 | 11 | 79 | |
| YSPGEINRVA | 2930 | | 10 | 11 | 79 | |
| YSPGCRVEF | 2648 | | 9 | 11 | 79 | |
| YSTYGKFLA | 1298 | | 9 | 12 | 86 | |
| YVGDLCGSVF | 276 | | 10 | 12 | 86 | |
| YVGGVEHR | 637 | | 8 | 14 | 100 | |
| YVPESDAA | 1939 | | 8 | 12 | 86 | |
| YVPESDAAA | 1939 | | 9 | 12 | 86 | |
| YVPESDAAAR | 1939 | | 10 | 12 | 86 | 0.0003 |
| 567 | | | 3 | | | |

TABLE XVII
HCV All Motif With Binding Information

| | | No. of | | Con- | |
|---|---|---|---|---|---|
| | | Amino | Sequence | servancy | |
| Sequence | Position | Acids | Frequency | (%) | A*1101 |
| AACNWTRGER | 647 | 10 | 12 | 86 | 0.0140 |
| AARALAHGVR | 147 | 10 | 11 | 79 | |
| AATLGFGAY | 1264 | 9 | 14 | 100 | |
| AAVCTRGVAK | 1187 | 10 | 11 | 79 | |
| ACNWTRGER | 648 | 9 | 12 | 86 | |
| ADGGCSGGAY | 1306 | 10 | 11 | 79 | |
| ADVIPVRR | 1142 | 8 | 12 | 86 | |
| ADVIPVRRR | 1142 | 9 | 11 | 79 | |
| AFASRGNH | 1926 | 8 | 14 | 100 | |
| AGALVAFK | 1865 | 8 | 12 | 86 | |
| AGVAGALVAFK | 1862 | 11 | 12 | 86 | |
| AGWLLSPR | 94 | 8 | 12 | 86 | |
| AGWLLSPRGSR | 94 | 11 | 12 | 86 | |
| ALSTGLIH | 689 | 8 | 12 | 86 | |
| ALSTGLIHLH | 689 | 10 | 12 | 86 | 0.0027 |
| ASQLSAPSLK | 2208 | 10 | 11 | 79 | |
| ASRGNHVSPTH | 1928 | 11 | 12 | 86 | |
| ATLGFGAY | 1265 | 8 | 14 | 100 | |
| ATLGFGAYMSK | 1265 | 11 | 12 | 86 | |
| ATRKTSER | 48 | 8 | 11 | 79 | |
| AVCTRGVAK | 1188 | 9 | 11 | 79 | 0.0250 |
| CAAILRRH | 1903 | 8 | 13 | 93 | |
| CGFADLMGY | 128 | 9 | 13 | 93 | |
| CGNTLTCY | 2742 | 8 | 11 | 79 | |
| CGSSDLYLVTR | 1130 | 11 | 11 | 79 | |
| CLRKLGVPPLR | 2941 | 11 | 12 | 86 | |
| CNCSIYPGH | 304 | 9 | 11 | 79 | |
| CNWTRGER | 649 | 8 | 12 | 86 | |
| CSSNVSVAH | 2819 | 9 | 12 | 86 | |
| CTCGSSDLY | 1128 | 9 | 11 | 79 | 0.0063 |
| CTWMNSTGFTK | 555 | 11 | 11 | 79 | 0.7500 |
| CVQPEKGGR | 2599 | 9 | 11 | 79 | 0.0005 |
| CVQPEKGGRK | 2599 | 10 | 11 | 79 | 0.0008 |
| DAHFLSQTK | 1574 | 9 | 14 | 100 | 0.0005 |
| DGGCSGGAY | 1307 | 9 | 11 | 79 | |
| DIIICDECH | 1316 | 9 | 12 | 86 | |
| DLGVRVCEK | 2617 | 9 | 13 | 93 | 0.0002 |
| DLYLVTRH | 1134 | 8 | 12 | 86 | |
| DVIPVRRR | 1143 | 8 | 11 | 79 | |
| ECYDAGCAWY | 1524 | 10 | 11 | 79 | |
| EGAVQWMNR | 1915 | 9 | 14 | 100 | 0.0014 |
| EMGGNITR | 2245 | 8 | 12 | 86 | |
| EVFCVQPEK | 2596 | 9 | 12 | 86 | 0.0270 |
| FCVQPEKGGR | 2598 | 10 | 11 | 79 | |
| FCVQPEKGGRK | 2598 | 11 | 11 | 79 | |
| FGAYMSKAH | 1269 | 9 | 12 | 86 | |
| FGYGAKDVR | 2554 | 9 | 12 | 86 | 0.0005 |
| FLLLADAR | 728 | 8 | 14 | 100 | |
| FTEAMTRY | 2792 | 8 | 14 | 100 | |
| FTGLTHIDAH | 1567 | 10 | 13 | 93 | |
| GAARALAH | 146 | 8 | 11 | 79 | |
| GAARALAHGVR | 146 | 11 | 11 | 79 | |
| GAVQWMNR | 1916 | 8 | 14 | 100 | |
| GAYMSKAH | 1270 | 8 | 12 | 86 | |
| GFADLMGY | 129 | 8 | 13 | 93 | |
| GFGAYMSK | 1268 | 8 | 12 | 86 | |
| GFGAYMSKAH | 1268 | 10 | 12 | 86 | |
| GFQYSPGQR | 2645 | 9 | 11 | 79 | |
| GGAARALAH | 145 | 9 | 11 | 79 | |
| GGCSGGAY | 1308 | 8 | 11 | 79 | |
| GGGQIVGGVY | 26 | 10 | 14 | 100 | |
| GGQIVGGVY | 27 | 9 | 14 | 100 | |
| GGRHLIFCH | 1392 | 9 | 14 | 100 | 0.0001 |
| GGRHLIFCHSK | 1392 | 11 | 14 | 100 | |
| GGVLAALAAY | 1669 | 10 | 12 | 86 | |
| GGVYLLPR | 32 | 8 | 13 | 93 | |
| GGVYLLPRR | 32 | 9 | 13 | 93 | 0.0010 |
| GIYLLPNR | 3037 | 8 | 11 | 79 | |
| GLPVCQDH | 1552 | 8 | 13 | 93 | |
| GLPVSARR | 1004 | 8 | 11 | 79 | |
| GLSAFSLH | 2921 | 8 | 11 | 79 | |
| GLSAFSLHSY | 2921 | 10 | 11 | 79 | 0.0005 |
| GLTHIDAH | 1569 | 8 | 13 | 93 | |
| GNHVSPTH | 1931 | 8 | 12 | 86 | |
| GNHVSPTHY | 1931 | 9 | 12 | 86 | |
| GNITRVESENK | 2248 | 11 | 12 | 86 | |
| GSSDLYLVTR | 1131 | 10 | 12 | 86 | |
| GSSDLYLVTRH | 1131 | 11 | 12 | 86 | |
| GSSYGFQY | 2641 | 8 | 11 | 79 | |
| GTFPINAY | 2063 | 8 | 11 | 79 | |
| GVAGALVAFK | 1863 | 10 | 12 | 86 | 1.4000 |
| GVCWTVYH | 1081 | 8 | 11 | 79 | |
| GVGIYLLPNR | 3035 | 10 | 11 | 79 | 0.0140 |
| GVLAALAAY | 1670 | 9 | 12 | 86 | 0.0110 |
| GVRATRKTSER | 45 | 11 | 11 | 79 | |
| GVRVCEKMALY | 2619 | 11 | 14 | 100 | |
| GVRVLEDGVNY | 154 | 11 | 12 | 86 | |
| GVVCAAILR | 1900 | 9 | 11 | 79 | |
| GVVCAAILRR | 1900 | 10 | 11 | 79 | |
| GVVCAAILRRH | 1900 | 11 | 11 | 79 | |
| GVYLLPRR | 33 | 8 | 13 | 93 | |
| GVYLLPRRGPR | 33 | 11 | 13 | 93 | |
| HADVIPVR | 1141 | 8 | 11 | 79 | |
| HADVIPVRR | 1141 | 9 | 11 | 79 | |
| HADVIPVRRR | 1141 | 10 | 11 | 79 | |
| HAPTGSGK | 1234 | 8 | 14 | 100 | |
| HAPTGSGKSTK | 1234 | 11 | 13 | 93 | |
| HGLSAFSLH | 2920 | 9 | 11 | 79 | |
| HGLSAFSLHSY | 2920 | 11 | 11 | 79 | |
| HGPTPLLY | 1624 | 8 | 11 | 79 | |
| HGPTPLLYR | 1624 | 9 | 11 | 79 | |
| HIDAHFLSQTK | 1572 | 11 | 14 | 100 | |
| HLHAPTGSGK | 1232 | 10 | 12 | 86 | 0.0024 |
| HLHQNIVDVQY | 696 | 11 | 11 | 79 | |
| HLIFCHSK | 1395 | 8 | 14 | 100 | |
| HLIFCHSKK | 1395 | 9 | 14 | 100 | 0.0006 |
| HLIFCHSKKK | 1395 | 10 | 14 | 100 | 0.0002 |
| HMWNFISGIQY | 1769 | 11 | 13 | 93 | |
| HSYSPGEINR | 2928 | 10 | 11 | 79 | |
| HTPGCVPCVR | 222 | 10 | 11 | 79 | 0.0012 |
| IAFASRGNH | 1925 | 9 | 14 | 100 | 0.0003 |
| IDAHFLSQTK | 1573 | 10 | 14 | 100 | |
| IFCHSKKK | 1397 | 8 | 14 | 100 | |
| IIICDECH | 1317 | 8 | 12 | 86 | |
| INTNGSWH | 415 | 8 | 11 | 79 | |
| ITRVESENK | 2250 | 9 | 12 | 86 | 0.0079 |
| ITYSTYGK | 1296 | 8 | 12 | 86 | |
| IVDVQYLY | 701 | 8 | 12 | 86 | |
| IVFPDLGVR | 2613 | 9 | 11 | 79 | 0.0044 |
| IVGGVYLLPR | 30 | 10 | 13 | 93 | 0.0056 |
| IVGGVYLLPRR | 30 | 11 | 13 | 93 | |
| KCDELAAK | 1404 | 8 | 12 | 86 | |
| KFGYGAKDVR | 2553 | 10 | 12 | 86 | |
| KGGRHLIFCH | 1391 | 10 | 11 | 79 | |
| KGGRKPAR | 2604 | 8 | 11 | 79 | |
| KLGVPPLR | 2944 | 8 | 12 | 86 | |
| KNEVFCVQPEK | 2594 | 11 | 11 | 79 | |
| KSTKVPAAY | 1241 | 9 | 12 | 86 | 0.0001 |
| KTKRNTNR | 10 | 8 | 12 | 86 | |
| KTKRNTNRR | 10 | 9 | 12 | 86 | 0.0100 |
| KTSERSQPR | 51 | 9 | 13 | 93 | 0.0640 |
| KTSERSQPRGR | 51 | 11 | 12 | 86 | |
| LADGGCSGGAY | 1305 | 11 | 11 | 79 | |
| LAEQFKQK | 1729 | 8 | 12 | 86 | |
| LDQAETAGAR | 1338 | 10 | 12 | 86 | |
| LFLLLADAR | 727 | 9 | 14 | 100 | |
| LFTFSPRR | 290 | 8 | 11 | 79 | |
| LGFGAYMSK | 1267 | 9 | 12 | 86 | 0.2900 |
| LGFGAYMSKAH | 1267 | 11 | 12 | 86 | |
| LGGAARALAH | 144 | 10 | 11 | 79 | |
| LGVRATRK | 44 | 8 | 12 | 86 | |
| LGVRVCEK | 2618 | 8 | 14 | 100 | |
| LIAFASRGNH | 1924 | 10 | 14 | 100 | |
| LIEANLLWR | 2235 | 9 | 12 | 86 | 0.0005 |
| LIFCHSKK | 1396 | 8 | 14 | 100 | |
| LIFCHSKKK | 1390 | 9 | 14 | 100 | 0.1900 |
| LINTNGSWH | 414 | 9 | 11 | 79 | |
| LIVFPDLGVR | 2612 | 10 | 11 | 79 | 0.0001 |
| LLAPITAY | 1030 | 8 | 14 | 100 | |
| LLFLLLADAR | 726 | 10 | 14 | 100 | |
| LLPRRGPR | 36 | 8 | 13 | 93 | |
| LLSPRGSR | 97 | 8 | 12 | 86 | |
| LSAFSLHSY | 2922 | 9 | 11 | 79 | 0.0002 |
| LSNSLLRH | 2479 | 8 | 12 | 86 | |
| LSNSLLRHH | 2479 | 9 | 12 | 86 | 0.0001 |
| LSTGLIHLH | 690 | 9 | 12 | 86 | |
| LTCGFADLMGY | 126 | 11 | 12 | 86 | |
| LTSMLTDPSH | 2176 | 10 | 13 | 93 | |
| LVAYQATVCAR | 1591 | 11 | 11 | 79 | |
| LVDILAGY | 1853 | 8 | 11 | 79 | |
| MGFSYDTR | 2668 | 8 | 11 | 79 | |
| MGSSYGFQY | 2640 | 9 | 11 | 79 | |
| MNRLIAFASR | 1921 | 10 | 14 | 100 | |
| MNSTGFTK | 558 | 8 | 11 | 79 | |
| MSTNPKPQR | 1 | 9 | 11 | 79 | |
| MSTNPKPQRK | 1 | 10 | 11 | 79 | |
| NCGYRRCR | 2726 | 8 | 11 | 79 | |
| NCSIYPGH | 305 | 8 | 11 | 79 | |
| NFISGIQY | 1772 | 8 | 14 | 100 | |
| NGVCWTVY | 1080 | 8 | 11 | 79 | |
| NGVCWTVYH | 1080 | 9 | 11 | 79 | |
| NITRVESENK | 2249 | 10 | 12 | 86 | 0.0062 |
| NIVDVQYLY | 700 | 9 | 12 | 86 | 0.0140 |
| NTNRRPQDVK | 14 | 10 | 11 | 79 | 0.0007 |
| NTPGLPVCQDH | 1549 | 11 | 13 | 93 | |
| PALSTGLIH | 688 | 9 | 12 | 86 | |
| PALSTGLIHLH | 688 | 11 | 12 | 86 | |
| PCSGSWLR | 1976 | 8 | 11 | 79 | |
| PCTCGSSDLY | 1127 | 10 | 11 | 79 | |
| PDLGVRVCEK | 2616 | 10 | 13 | 93 | |
| PGCVPCVR | 224 | 8 | 12 | 86 | |
| PGEGAVQWMN | 1913 | 11 | 13 | 93 | |
| PGGGQIVGGVY | 25 | 11 | 14 | 100 | |
| PGLPVCQDH | 1551 | 9 | 13 | 93 | |
| PGYPWPLY | 79 | 8 | 14 | 100 | |
| PITYSTYGK | 1295 | 9 | 11 | 79 | |
| PLGGAARALAH | 143 | 11 | 11 | 79 | |
| PMGFSYDTR | 2667 | 9 | 11 | 79 | |
| PNIRTGVR | 1281 | 8 | 13 | 93 | |
| PSPVVVGTTDR | 514 | 11 | 13 | 93 | |
| PSWDQMWK | 1607 | 8 | 11 | 79 | |
| PTDCFRKH | 587 | 8 | 13 | 93 | |
| PTDPRRRSR | 109 | 9 | 12 | 86 | 0.0005 |
| PTGSGKSTK | 1236 | 9 | 13 | 93 | 0.0001 |
| PTLHGPTPLLY | 1621 | 11 | 11 | 79 | |
| PVVVGTTDR | 516 | 9 | 13 | 93 | 0.0005 |
| QAETAGAR | 1340 | 8 | 12 | 86 | |
| QIVGGVYLLPR | 29 | 11 | 13 | 93 | |
| QLFTFSPR | 289 | 8 | 12 | 86 | |
| QLFTFSPRR | 289 | 9 | 11 | 79 | 0.0330 |
| QLSAPSLK | 2210 | 8 | 11 | 79 | |
| QNIVDVQY | 699 | 8 | 11 | 79 | |
| QNIVDVQYLY | 699 | 10 | 11 | 79 | |
| RAAVCTRGVAK | 1186 | 11 | 11 | 79 | |
| RALAHGVR | 149 | 8 | 14 | 100 | |
| RATRKTSER | 47 | 9 | 11 | 79 | |
| RGNHVSPTH | 1930 | 9 | 12 | 86 | 0.0001 |
| RGNHVSPTHY | 1930 | 10 | 12 | 86 | 0.0001 |
| RGPRLGVR | 40 | 8 | 13 | 93 | |
| RGPRLGVRATR | 40 | 11 | 11 | 79 | |
| RGRRQPIPK | 59 | 9 | 13 | 93 | 0.0017 |
| RGSLLSPR | 1154 | 8 | 12 | 86 | |
| RLGVRATR | 43 | 8 | 11 | 79 | |
| RLGVRATRK | 43 | 9 | 11 | 79 | 0.0290 |
| RLHGLSAFSLH | 2918 | 11 | 11 | 79 | |
| RLIAFASR | 1923 | 8 | 14 | 100 | |
| RLIAFASRGNH | 1923 | 11 | 14 | 100 | |
| RLIVFPDLGVR | 2611 | 11 | 11 | 79 | |
| RLLAPITAY | 1029 | 9 | 12 | 86 | 0.0270 |
| RMYVGGVEH | 635 | 9 | 14 | 100 | |
| RMYVGGVEHR | 635 | 10 | 14 | 100 | 0.0200 |
| RNTNRRPQDVK | 13 | 11 | 11 | 79 | |
| RSQPRGRR | 55 | 8 | 13 | 93 | |
| RVCEKMALY | 2621 | 9 | 14 | 100 | 0.5000 |
| RVLEDGVNY | 156 | 9 | 12 | 86 | 0.0068 |
| SAFSLHSY | 2923 | 8 | 11 | 79 | |
| SASQLSAPSLK | 2207 | 11 | 11 | 79 | |
| SCSSNVSVAH | 2818 | 10 | 12 | 86 | |
| SDLYLVTR | 1133 | 8 | 12 | 86 | |
| SDLYLVTRH | 1133 | 9 | 12 | 86 | |
| SGKSTKVPAAY | 1239 | 11 | 12 | 86 | |
| SMLTDPSH | 2178 | 8 | 14 | 100 | |
| SNSLLRHH | 2480 | 8 | 12 | 86 | |
| SSDLYLVTR | 1132 | 9 | 12 | 86 | 0.0044 |
| SSDLYLVTRH | 1132 | 10 | 12 | 86 | 0.0013 |
| SSNVSVAH | 2820 | 8 | 12 | 86 | |
| STGLIHLH | 691 | 8 | 12 | 86 | |
| STKVPAAY | 1242 | 8 | 12 | 86 | |
| STNPKPQR | 2 | 8 | 11 | 79 | |
| STNPKPQRK | 2 | 9 | 11 | 79 | |
| STNPKPQRKTK | 2 | 11 | 11 | 79 | |
| SVAATLGFGAY | 1262 | 11 | 14 | 100 | |
| TCGFADLMGY | 127 | 10 | 13 | 93 | |
| TCGSSDLY | 1129 | 8 | 11 | 79 | |
| TDPRRRSR | 110 | 8 | 12 | 86 | |
| TGEIPFYGK | 1375 | 9 | 11 | 79 | |
| TGLTHIDAH | 1568 | 9 | 13 | 93 | 0.0001 |
| TGSGKSTK | 1237 | 8 | 13 | 93 | |
| TLGFGAYMSK | 1266 | 10 | 12 | 86 | 0.0610 |
| TLHGPTPLLY | 1622 | 10 | 11 | 79 | 0.0007 |
| TLHGPTPLLYR | 1622 | 11 | 11 | 79 | |
| TLPALSTGLIH | 686 | 11 | 11 | 79 | |
| TLWARMILMTH | 2871 | 11 | 11 | 79 | |
| TNPKPQRK | 3 | 8 | 11 | 79 | |
| TNPKPQRKTK | 3 | 10 | 11 | 79 | |
| TNPKPQRKTKR | 3 | 11 | 11 | 79 | |
| TNRRPQDVK | 15 | 9 | 11 | 79 | |
| TSCSSNVSVAH | 2817 | 11 | 12 | 86 | |
| TSERSQPR | 52 | 8 | 13 | 93 | |
| TSERSQPRGR | 52 | 10 | 12 | 86 | 0.0001 |
| TSERSQPRGRR | 52 | 11 | 12 | 86 | |
| TSLTGRDK | 1050 | 8 | 12 | 86 | |
| TSMLTDPSH | 2177 | 9 | 13 | 93 | 0.0001 |
| VAATLGFGAY | 1263 | 10 | 14 | 100 | |
| VAGALVAFK | 1864 | 9 | 12 | 86 | 0.8900 |
| VAYQATVCAR | 1592 | 10 | 11 | 79 | 0.0038 |
| VCAAILRR | 1902 | 8 | 11 | 79 | |
| VCAAILRRH | 1902 | 9 | 11 | 79 | |
| VCEKMALY | 2622 | 8 | 14 | 100 | |
| VCTRGVAK | 1189 | 8 | 11 | 79 | |
| VDYPYRLWH | 614 | 9 | 13 | 93 | |
| VDYPYRLWHY | 614 | 10 | 13 | 93 | |
| VFCVQPEK | 2597 | 8 | 12 | 86 | |
| VFCVQPEKGGR | 2597 | 11 | 11 | 79 | |
| VFPDLGVR | 2614 | 8 | 11 | 79 | |
| VFTGLTHIDAH | 1566 | 11 | 13 | 93 | |
| VGGVLAALAAY | 1668 | 11 | 12 | 86 | |
| VGGVYLLPR | 31 | 9 | 13 | 93 | 0.0019 |
| VGGVYLLPRR | 31 | 10 | 13 | 93 | |
| VGIYLLPNR | 3036 | 9 | 11 | 79 | 0.0100 |
| VGVVCAAILR | 1899 | 10 | 11 | 79 | |
| VGVVCAAILRR | 1899 | 11 | 11 | 79 | |
| VLAALAAY | 1671 | 8 | 12 | 86 | |
| VLDQAETAGAR | 1337 | 11 | 12 | 86 | |
| VLEDGVNY | 157 | 8 | 12 | 86 | |
| VLTSMLTDPSH | 2175 | 11 | 13 | 93 | |
| VLVDILAGY | 1852 | 9 | 11 | 79 | |
| VMGSSYGFQY | 2639 | 10 | 11 | 79 | |
| VTRHADVIPVR | 1138 | 11 | 11 | 79 | |
| VVCAAILR | 1901 | 8 | 11 | 79 | |
| VVCAAILRR | 1901 | 9 | 11 | 79 | |
| VVCAAILRRH | 1901 | 10 | 11 | 79 | |
| VVGVVCAAILR | 1898 | 11 | 11 | 79 | |
| VVVGTTDR | 517 | 8 | 13 | 93 | |
| WAGWLLSPR | 93 | 8 | 12 | 86 | |
| WAQPGYPWPL | 76 | 11 | 12 | 86 | |
| WARMILMTH | 2873 | 9 | 12 | 86 | |
| WGPTDPRR | 107 | 8 | 12 | 86 | |
| WGPTDPRRR | 107 | 9 | 12 | 86 | |
| WGPTDPRRRSR | 107 | 11 | 12 | 86 | |
| WLLSPRGSR | 96 | 9 | 12 | 86 | 0.0005 |
| WMNRLIAFASR | 1920 | 11 | 14 | 100 | |
| WMNSTGFTK | 557 | 9 | 11 | 79 | 0.0810 |
| WNFISGIQY | 1771 | 9 | 14 | 100 | |
| YDAGCAWY | 1526 | 8 | 11 | 79 | |
| YDIIICDECH | 1315 | 10 | 12 | 86 | |
| YGFQYSPGQR | 2644 | 10 | 11 | 79 | |
| YLLPRRGPR | 35 | 9 | 13 | 93 | 0.0005 |
| YSPGEINR | 2930 | 8 | 11 | 79 | |
| YVGGVEHR | 637 | 8 | 14 | 100 | |
| YVPESDAAAR | 1939 | 10 | 12 | 86 | 0.0001 |
| 311 | | 3 | | | |

TABLE XVIII
HCV A24 Motif With Binding Information

| | | No. of | | Con- | |
|---|---|---|---|---|---|
| | | Amino | Sequence | servancy | |
| Sequence | Position | Acids | Frequency | (%) | A*2401 |
| AWDMMMNW | 319 | 8 | 12 | 86 | |
| AYAAQGYKVL | 1248 | 10 | 11 | 79 | 0.0009 |
| AYYRGLDVSVI | 1421 | 11 | 14 | 100 | |
| CYDAGCAW | 1525 | 8 | 11 | 79 | |
| CYDAGCAWYEL | 1525 | 11 | 11 | 79 | |
| DFSLDPTF | 1468 | 8 | 14 | 100 | |
| DFSLDPTFTI | 1468 | 10 | 14 | 100 | |
| FWAKHMWNF | 1765 | 9 | 12 | 86 | 6.9000 |
| FWAKHMWNFI | 1765 | 10 | 12 | 86 | |
| GFADLMGYI | 129 | 9 | 13 | 93 | |
| GFADLMGYIPL | 129 | 11 | 11 | 79 | |
| GFSYDTRCF | 2669 | 9 | 11 | 79 | |
| GWRLLAPI | 1027 | 8 | 11 | 79 | |
| GYGAGVAGAL | 1859 | 10 | 12 | 86 | 0.0003 |
| GYIPLVGAPL | 135 | 10 | 11 | 79 | 0.0057 |
| GYRRCRASGVL | 2728 | 11 | 12 | 86 | |
| HMWNFISGI | 1769 | 9 | 13 | 93 | |
| IFLLALLSCL | 176 | 10 | 12 | 86 | |
| IMAKNEVF | 2591 | 8 | 12 | 86 | |
| KFPGGGCI | 23 | 8 | 13 | 93 | |
| LFNILGGW | 1813 | 8 | 12 | 86 | |
| LWARMILMTHF | 2872 | 11 | 12 | 86 | |
| LWRQEMGGNI | 2241 | 10 | 12 | 86 | |
| LYLVTRHADVI | 1135 | 11 | 11 | 79 | |
| MWNFISGI | 1770 | 8 | 14 | 100 | |
| MWNFISGIQYL | 1770 | 11 | 14 | 100 | |
| MYVGGVEHRL | 636 | 10 | 13 | 93 | 0.0270 |
| NFISGIQYL | 1772 | 9 | 14 | 100 | 0.0170 |
| PMGFSYDTRCF | 2667 | 11 | 11 | 79 | |
| QFKQKALGL | 1732 | 9 | 12 | 86 | |
| QFKQKALGLL | 1732 | 10 | 12 | 86 | |
| QWMNRLIAF | 1919 | 9 | 14 | 100 | |
| QYLAGLSTL | 1778 | 9 | 14 | 100 | 0.0480 |
| QYSPGCRVEF | 2647 | 10 | 11 | 79 | 0.0180 |
| QYSPGQRVEFL | 2647 | 11 | 11 | 79 | |
| RMAWDMMMNW | 317 | 10 | 12 | 86 | |
| RMILMTHF | 2875 | 8 | 12 | 86 | |
| RMILMTHFF | 2875 | 9 | 12 | 86 | |
| RMYVGGVEHRL | 635 | 11 | 13 | 93 | |
| SFSIFLLAL | 173 | 9 | 14 | 100 | |
| SFSIFLLALL | 173 | 10 | 14 | 100 | 0.0041 |
| SMLTDPSHI | 2178 | 9 | 14 | 100 | |
| SWDQMWKCL | 1608 | 9 | 11 | 79 | |
| SYLKGSSGGPL | 1164 | 11 | 12 | 86 | |
| TWMNSTGF | 556 | 8 | 11 | 79 | |
| TWVLVGGVL | 1664 | 9 | 12 | 86 | |
| TYSTYGKF | 1297 | 8 | 13 | 93 | |
| TYSTYGKFL | 1297 | 9 | 12 | 86 | 0.0230 |
| VFTGLTHI | 1566 | 8 | 13 | 93 | |
| VMGSSYGF | 2639 | 8 | 11 | 79 | |
| VYLLPRRGPRL | 34 | 11 | 13 | 93 | 0.0016 |
| WMNRLIAF | 1920 | 8 | 14 | 100 | |
| YYRGLDVSVI | 1422 | 10 | 14 | 100 | |
| 53 | | 2 | | | |

TABLE XIXa

| | | | | | | |
|---|---|---|---|---|---|---|
| | | Core | | | Exemplary | Exemplary |
| | Core | Conservancy | Exemplary | Position In | Sequence | Sequence |
| Core Sequence | Freq. | (%) | Sequence | HCV Poly-protein | Frequency | Conservancy (%) |

HCV DR-Super Motif

| | | | | | | |
|---|---|---|---|---|---|---|
| FGAYMSKAH | 12 | 86 | TLGFGAYMSKAHGVD | 1266 | 5 | 36 |
| FGCTWMNST | 12 | 85 | GNWFGCTWMNSTGFT | 550 | 11 | 79 |
| FKQKALGLL | 12 | 86 | AEQFKQKALGLLQTA | 1730 | 12 | 86 |
| FLLALLSCL | 12 | 86 | FSIFLLALLSCLTVP | 174 | 6 | 43 |
| FPDLGVRVC | 11 | 79 | LIVFPDLGVRVCEKM | 2612 | 11 | 79 |
| FQVAHLHAP | 12 | 86 | PQTFQVAHLHAPTGS | 1225 | 6 | 43 |
| FRAAVCTRG | 12 | 86 | VGIFRAAVCTRGVAK | 1182 | 7 | 50 |
| FSIFLLALL | 14 | 100 | GCSFSIFLLALLSCL | 171 | 12 | 86 |
| FSLDPTFTI | 14 | 100 | TVDFSLDPTFTIETT | 1466 | 11 | 79 |
| FTEAMTRYS | 14 | 100 | LRVFTEAMTRYSAPP | 2789 | 7 | 50 |
| FTPSPVVVG | 13 | 93 | VYCFTPSPVVVYGTTD | 509 | 13 | 93 |
| FTTLPALST | 11 | 79 | PCSFTTLPALSTGLI | 681 | 9 | 64 |
| FWAKHMWNF | 12 | 86 | LEVFWAKHMWNFISQ | 1762 | 3 | 21 |
| IDAHFLSQT | 14 | 100 | LTHIDAHFLSQTKQA | 1570 | 7 | 50 |
| IDCNTCVTQ | 12 | 86 | DSVIDCNTCVTQIVD | 1454 | 12 | 86 |
| IDTLTCGFA | 12 | 86 | GKVIDTLTCGFADLM | 120 | 12 | 86 |
| IEANLLWRQ | 12 | 86 | ADLIEANLLWRQEMG | 2233 | 7 | 50 |
| IFLLALLSC | 14 | 100 | SFSIFLLALLSCLTV | 173 | 6 | 43 |
| ILGGWVAAQ | 12 | 86 | LFNILGGWVAAQLAP | 1813 | 8 | 57 |
| ILGIGTVLD | 12 | 86 | STTILGIGTVLDQAE | 1328 | 8 | 57 |
| ILRRHVGPG | 11 | 79 | CAAILRRHVNGPGEGA | 1903 | 11 | 79 |
| ILSPGALVV | 13 | 93 | LPAILSPGALVVGVV | 1888 | 11 | 79 |
| INAYTTGPC | 12 | 86 | TFPINAYTTGPCTPS | 2064 | 8 | 57 |
| IPLVGAPLG | 11 | 79 | MGYIPLVGAPLGGAA | 134 | 10 | 71 |
| ITRVESENK | 12 | 86 | GGNTRVESENKVVI | 2247 | 10 | 71 |
| ITSCSSNVS | 14 | 100 | LELITSCSSNVSVAH | 2813 | 11 | 79 |
| IVFPDLGVR | 11 | 79 | ARUVFPDLGVRVCE | 2610 | 11 | 79 |
| LAALAAYCL | 12 | 86 | GGVLAALAAYCLTTG | 1669 | 8 | 57 |
| LADGGCSGG | 11 | 79 | GKRADGGCSGGAYD | 1302 | 10 | 71 |
| LAGLSTLPG | 14 | 100 | IQYLAGLSTUGNPA | 1777 | 14 | 100 |
| LAGYGAGVA | 11 | 79 | VDILAGYGAGVAGAL | 1854 | 10 | 71 |
| LATATPPGS | 12 | 86 | LVVLATATPPQSVTV | 1348 | 9 | 64 |
| LDPTFTIET | 12 | 86 | DFSLDPTFIIETTTV | 1468 | 5 | 36 |
| LDQAETAGA | 12 | 86 | GTVLDQAETAGARLV | 1335 | 12 | 86 |
| LELITSCSS | 13 | 93 | EYDLEUTSCSSNVS | 2810 | 13 | 93 |
| LEVVTSTWV | 12 | 86 | SADLEVVTSTWVLVG | 1655 | 11 | 79 |
| LFLLLADAR | 14 | 100 | VVLLFLLLADARVCS | 724 | 4 | 29 |
| LGGWVAAQL | 12 | 86 | FNILGGWVAAQLAPP | 1814 | 8 | 57 |
| LGIGTVLDQ | 13 | 93 | TTILGIGTVLDQAET | 1329 | 9 | 64 |
| LGVRATRKT | 12 | 86 | GPRLGVRATRKTSER | 41 | 10 | 71 |
| LGVRVCEKM | 14 | 100 | FPDLGVRVCEKMALY | 2615 | 11 | 79 |
| LHGLSAFSL | 11 | 79 | IERUIGLSAFSLHSY | 2916 | 6 | 43 |
| LHGPTPLLY | 11 | 79 | KPTLHGPTPLLYRLG | 1620 | 11 | 79 |
| LHQNIVDVQ | 12 | 86 | LIHLHQNIVDVQYLY | 694 | 10 | 71 |
| LHSYSPGEI | 11 | 79 | AFSLHSYSPGEINRV | 2924 | 11 | 79 |
| LIAFASRGN | 14 | 100 | MNRLIAFASRGNHVS | 1921 | 12 | 86 |
| LIEANLLWR | 12 | 86 | DADLIEANLLWRQEM | 2232 | 7 | 50 |
| LIFCHSKKK | 14 | 100 | GRHUFCHSKKKCDE | 1393 | 14 | 100 |
| LITSCSSNV | 14 | 100 | DLELITSCSSNVSVA | 2812 | 13 | 93 |
| LLALLSCLT | 12 | 86 | SIFLLALLSCLTVPA | 175 | 5 | 36 |
| LLFLLLADA | 14 | 100 | YVVLLFLLLADARVC | 723 | 5 | 36 |
| LLFNILGGW | 12 | 86 | QNTLLFNILGGWVAA | 1809 | 4 | 29 |
| LLLADARVC | 13 | 93 | LLFLLLADARVCACL | 726 | 9 | 64 |
| LLPAILSPQ | 13 | 93 | LVNLLPAILSPGALV | 1884 | 10 | 71 |
| LMGYIPLVG | 11 | 79 | FADLMQYIPLVGAPL | 130 | 11 | 79 |
| LNPSVAATL | 14 | 100 | VLVLNPSVAATLQFQ | 1256 | 14 | 100 |
| LPAILSPGA | 13 | 93 | VNLLPAILSPQALVV | 1885 | 11 | 79 |
| LPALSTGLI | 12 | 86 | FTTLPALSTGLIHLH | 684 | 11 | 79 |
| LPRRGPRLG | 13 | 93 | VYLLPRRGPRLGVRA | 34 | 13 | 93 |
| LRDLAVAVE | 11 | 79 | HNGLRDLAVAVEPVV | 966 | 4 | 29 |
| LRKLGVPPL | 12 | 86 | ASCLRKLGVPPLRVW | 2939 | 7 | 50 |
| LSAFSLHSY | 11 | 79 | LHGLSAFSLHSYSFG | 2919 | 11 | 79 |
| LSAPSLKAT | 11 | 79 | ASQLSAPSLKATCTT | 2208 | 7 | 50 |
| LSNSLLRHH | 12 | 86 | INALSNSLLRHHNMV | 2475 | 4 | 29 |
| LSPGALVVG | 13 | 93 | PAILSPGALVVGVVC | 1889 | 11 | 79 |
| LSPLLLSTT | 11 | 79 | RSELSPLLLSTTEWQ | 664 | 7 | 50 |
| LSPRQSRPS | 11 | 79 | GWLLSPRQSRPSWQP | 95 | 11 | 79 |
| LSTGLIHLH | 12 | 86 | LPALSTGLIHLHQNI | 607 | 10 | 71 |
| LTQGFADLM | 12 | 86 | IDILTQGFADLMGYI | 123 | 12 | 86 |
| LTHIDAHFL | 13 | 93 | FTQLTHIDAHFLSQT | 1567 | 13 | 93 |
| LTSMLTDPS | 13 | 93 | VAVLTSMLTDPSHIT | 2173 | 9 | 64 |
| LVAYQATVC | 12 | 86 | FPYLVAYQATVCARA | 1588 | 9 | 64 |
| LVDILAGYG | 11 | 79 | GKVLVDILAGYGAGV | 1850 | 9 | 64 |
| LVGGVLAAL | 12 | 86 | TWVLVGGVLAALAAY | 1664 | 12 | 88 |
| LVLNPSVAA | 14 | 100 | YKVLVLNPSVAATLG | 1254 | 14 | 100 |
| LVNLLPAIL | 11 | 79 | TEDLVNLLPAILSPG | 1881 | 10 | 71 |
| LVTRHADVI | 11 | 79 | DLYLVTRHADVIPVR | 1134 | 11 | 79 |
| LVVGVVCAA | 11 | 79 | PGALVVGVVCAAILR | 1094 | 11 | 79 |
| LVVLATATP | 12 | 86 | GARLVVLATATPPGS | 1345 | 11 | 79 |
| LWARMILMT | 12 | 86 | APTLWARMILMTHFF | 2869 | 11 | 79 |
| LWRQGMGGN | 12 | 86 | ANLLWRQEMGGNHTT | 2238 | 12 | 86 |
| LYRLGAVQN | 11 | 79 | TPLLYRLQAVQNEVT | 1627 | 9 | 64 |
| MAKNEVFCV | 12 | 86 | THMAKNEVFCVQPE | 2509 | 9 | 64 |
| MAWDMMMNW | 12 | 86 | GHRMAWDMMMNWSPT | 315 | 12 | 86 |
| MGGNITRVG | 12 | 86 | RQGMGGNTRVESEN | 2243 | 12 | 86 |
| MGYIPLVGA | 11 | 79 | ADLMGYIPLVGAPLG | 131 | 11 | 79 |
| MLTDPSHIT | 14 | 100 | LTSMLTDPSHITAET | 2176 | 8 | 57 |
| MNRLIAFAS | 14 | 100 | VQWMNRLIAFASRGN | 1918 | 14 | 100 |
| MTRYSAPPG | 14 | 100 | TEAMTRYSAPPGDPP | 2793 | 10 | 71 |
| MWNFISGIQ | 14 | 100 | AKHMWNFISGIQYLA | 1767 | 12 | 86 |
| MYVGGVEHR | 14 | 100 | KVRMYVGQVEHRLNA | 633 | 5 | 36 |
| VAGALVAFK | 12 | 86 | GAQVAGALVAFKVMS | 1861 | 7 | 50 |
| VAHLHAPTG | 12 | 86 | TFQVAHLHAPTGSGK | 1227 | 6 | 43 |
| VATDALMTG | 12 | 86 | VVVVATDALMTGYTG | 1437 | 6 | 43 |
| VAYQATVCA | 12 | 86 | PYLVAYQATVCARAQ | 1589 | 11 | 79 |
| VCAAILRRH | 11 | 79 | VGVVCAAILRRHVGP | 1899 | 10 | 71 |
| VCEKMALYD | 14 | 100 | GVRVCEKMALYDVVS | 2619 | 11 | 79 |
| VCQDHLEFW | 12 | 86 | GLPVCQDHLEFWESV | 1552 | 6 | 43 |
| VCTRGVAKA | 11 | 79 | RAAVCTRQVAKAVDF | 1186 | 11 | 79 |
| VFCVQPEKQ | 12 | 86 | KNEVFCVQPEKGGRK | 2594 | 10 | 71 |
| VFTDNSSPP | 11 | 79 | RSPVFTDNSSPPAVP | 1211 | 10 | 71 |
| VFTGLTHID | 13 | 93 | WESVFTGLTHIDAHF | 1563 | 6 | 43 |
| VGGVLAALA | 12 | 86 | WVLVGGVLAALAAYC | 1665 | 12 | 86 |
| VGGVYLLPR | 13 | 93 | GQIVGGVYLLPRRGP | 28 | 13 | 93 |
| VGSQLPCEP | 12 | 86 | QYLVGSQLPCEPEPQ | 2158 | 6 | 43 |
| VGVVCAAIL | 11 | 79 | ALVVGVVCAAILRRH | 1896 | 11 | 79 |
| VIDCNTCVT | 12 | 86 | FDSVIDCNTCVTQTV | 1453 | 12 | 86 |
| VIDTLTCGF | 12 | 86 | LQKVIDTLTCGFADL | 119 | 11 | 79 |

HCV DR-Super Motif Binding Data Not Included

| | | | | | | |
|---|---|---|---|---|---|---|
| VLAALAAYC | 12 | 86 | VGGVLAALAAYCLTT | 1668 | 8 | 57 |
| VLATATPPG | 13 | 93 | RLVVLATATPPGSVT | 1347 | 9 | 64 |
| VLEDGVNYA | 12 | 86 | GVRVLEDGVNYATGN | 154 | 12 | 86 |
| VLNPSVAAT | 14 | 100 | KVLVLNPSVAATLGF | 1255 | 14 | 100 |
| VLTSMLTDP | 13 | 93 | DVAVLTSMLTDPSHI | 2172 | 9 | 64 |
| VLTTSCGNT | 11 | 79 | ASGVLTTSCGNTLTC | 2734 | 10 | 71 |
| VLVDILAGY | 11 | 79 | LGKVLVDILAGYGAG | 1849 | 10 | 71 |
| VLVGGVLAA | 12 | 86 | STWVLVGGVLAALAA | 1663 | 12 | 86 |
| VLVLNPSVA | 14 | 100 | GYKVLVLNPSVAATL | 1253 | 14 | 100 |
| VNLLPAILS | 12 | 86 | EDLVNLLPAILSPGA | 1882 | 11 | 79 |
| VPESDAAAR | 12 | 86 | THYVPESDAAARVTQ | 1937 | 7 | 50 |
| VTSTWVLVG | 12 | 86 | LEVVTSTWVLVGGVL | 1658 | 12 | 86 |
| VVATDALMT | 11 | 79 | DVVVVATDALMTGYT | 1436 | 6 | 43 |
| VVCAAILRR | 11 | 79 | VVGVVCAAILRRHVG | 1898 | 10 | 71 |
| VVGVVCAAI | 11 | 79 | GALVVGVVCAAILRR | 1895 | 11 | 79 |
| VVLATATPP | 12 | 86 | ARLVVLATATPPGSV | 1346 | 9 | 64 |
| VYCFTPSPV | 13 | 93 | CGPVYCFTPSPVVVG | 506 | 13 | 93 |
| WAGWLLSPR | 12 | 86 | GQGWAGWLLSPRGSR | 90 | 5 | 36 |
| WARMILMTH | 12 | 86 | PTLWARMILMTHFFS | 2870 | 11 | 79 |
| WGADTAACG | 12 | 86 | IITWGADTAACGDII | 988 | 6 | 43 |
| WGPTDPRRR | 12 | 86 | RPSWGPTDPRRRSRN | 104 | 10 | 71 |
| WMNRLIAFA | 14 | 100 | AVQWMNRLIAFASRG | 1917 | 14 | 100 |
| WRLLAPITA | 11 | 79 | SKGWRLLAPITAYAQ | 1025 | 4 | 29 |
| WTGALITPC | 11 | 79 | SYTWTGALITPCAAE | 2456 | 9 | 64 |
| WYELTPAET | 12 | 86 | GCAWYELTPAETTVR | 1529 | 5 | 36 |
| YATGNLPGC | 12 | 86 | GVNYATGNLPGCSFS | 161 | 11 | 79 |
| YCFTPSPVV | 13 | 93 | GPVYCFTPSPVVVGT | 507 | 13 | 93 |
| YDAGCAWYE | 11 | 79 | CECYDAGCAWYELTP | 1523 | 10 | 71 |
| YDIIICDEC | 12 | 86 | GGAYDIIICDECHST | 1312 | 10 | 71 |
| YDLELITSC | 13 | 93 | QPEYDLELITSCSSN | 2808 | 11 | 79 |
| YGAGVAGAL | 12 | 86 | LAGYGAGVAGALVAF | 1857 | 11 | 79 |
| YGFQYSPGQ | 11 | 79 | GSSYGFQYSPGQRVE | 2641 | 10 | 71 |
| YGKFLADGG | 11 | 79 | YSTYGKFLADGGCSG | 1298 | 10 | 71 |
| YKVLVLNPS | 14 | 100 | AQGYKVLVLNPSVAA | 1251 | 11 | 79 |
| YLAGLSTLP | 14 | 100 | GIQYLAGLSTLPGNP | 1776 | 14 | 100 |
| YLKGSSGGP | 12 | 86 | PVSYLKGSSGGPLLC | 1162 | 6 | 43 |
| YLTRDPTTP | 11 | 79 | RVYYLTRDPTTPLAR | 2833 | 9 | 64 |
| YQATVCARA | 13 | 93 | LVAYQATVCARAQAP | 1591 | 11 | 79 |
| YRGLDVSVI | 14 | 100 | VAYYRGLDVSVIPTS | 1420 | 7 | 50 |
| YRLGAVQNE | 11 | 79 | PLLYRLGAVQNEVTL | 1628 | 9 | 64 |
| YRRCRASGV | 13 | 93 | NQGYRRCRASGVLTT | 2726 | 10 | 71 |
| YSIEPLDLP | 11 | 79 | GACYSIEPLDLPQII | 2902 | 6 | 43 |
| YSPGEINRV | 11 | 79 | LHSYSPGEINRVASC | 2927 | 8 | 57 |
| YVGDLQGSV | 12 | 86 | SAMYVGDLCGSVFLV | 273 | 8 | 57 |
| VGIYLLPNR | 11 | 79 | | 3036 | | |
| 154 | | | | | | |

TABLE XIXb
HCV DR Super Motif With Binding Data

| | Exemplary | | | | | | |
|---|---|---|---|---|---|---|---|
| Core Sequence | Sequence | DR1 | DR2w2 1 | DR2w2 2 | DR3 | DR4w4 | DR4w15 |
| FGAYMSKAH | TLGFGAYMSKAHGVD | | | | | | |
| FGCTWMNST | GNWFGCTWMNSTGFT | 0.0360 | 0.0320 | 0.0013 | | 0.4200 | 0.0250 |
| FKQKALGLL | AEQFKQKALGLLQTA | 0.0490 | | | | 0.0006 | |
| FLLALLSCL | FSIFLLALLSCLTVP | | | | | | |
| FPDLGVRVC | UVFPDLGVRVCEKM | | | | | | |
| FQVAHLHAP | PQTFQVAHLHAPTGS | 0.2400 | | | | 0.0053 | |
| FRAAVCTRG | VGIFRAAVCTRGVAK | | | | | | |
| FSIFLLALL | GCSFSIFLLALLSCL | 0.0060 | | | | 0.0015 | |
| FSLDPTFTI | TVDFSLDPTFTIETT | 0.0001 | | | | 0.1600 | |
| FTEAMTRYS | LRVFTEAMTRYSAPP | | | | | | |
| FTPSPVVVG | VYCFTPSPVVVGTTD | 0.0180 | 0.0001 | 0.0003 | | 0.0920 | 0.0570 |
| FTTLPALST | PCSFTTLPALSTGU | | | | | | |
| FWAKHMWNF | LEVFWAKHMWNFISG | | | | | | |
| IDAHFLSQT | LTHIDAHFLSQTKQA | | | | | | |
| IDCNTCVTQ | DSVIDCNTCVTQTVD | 0.0001 | | | | 0.0009 | |
| IDTLTCGFA | GKVIDTLTCGFADLM | | | | | | |
| IEANLLWRQ | ADLIEANLLWRQEMG | | | | | | |
| IFLLALLSC | SFSIFLLALLSCLTV | | | | | | |
| ILGGWVAAQ | LFNILGGWVAAQLAP | | | | | | |
| ILGIGTVLD | STTILGIGTVLDQAE | | | | | | |
| ILRRHVGPG | CAALRRHVGPGEGA | 0.0034 | | | | 0.0003 | |
| ILSPGALW | LPAILSPGALVVGVV | | | | | | |
| INAYTTGPC | TFPINAYTTGCTPS | | | | | | |
| IPLVGAPLG | MGYIPLVGAPLGGAA | | | | | | |
| ITRVESENK | GGNITRVESENKVVI | | | | | | |
| ITSCSSNVS | LELITSCSSNVSVAH | 0.0245 | 0.0200 | 0.0003 | | 0.0870 | 0.0350 |
| IVFPDLGVR | ARLIVFPDLGVRVCE | 0.0053 | | | | 0.0017 | |
| LAALAAYCL | GGVLAALAAYCLTTG | | | | | | |
| LADGGCSCG | GKFLADGGCSGGAYD | | | | | | |
| LAGLSTLPG | IQYLAGLSTLPGNPA | 3.6000 | 0.0430 | 0.0094 | | 3.9000 | |
| LAGYGAGVA | VDILAGYGAGVAGAL | | | | | | |
| LATATPPGS | LVVLATATPPGSVTV | | | | | | |
| LDPTFTIET | DFSLDPTFTIETTTV | | | | | | |
| LDQAETAGA | GTVLDQAETAGARLV | 0.0001 | | | | 0.0170 | |
| LELITSCSS | EYDLELITSCSSNVS | | | | | | |
| LEVVTSTWV | SADLEVVTSTWVLVG | | | | | | |
| LFLLLADAR | WLLFLLLADARVCS | 0.0240 | | | | 0.0120 | |
| LGGWVAAQL | FNILGGWVAAQLAPP | | | | | | |
| LGIGTVLDQ | TTILGIGTVLDQAET | | | | | | |
| LGVRATRKT | GPRLGVRATRKTSER | | | | | | |
| LGVRVCEKM | FPDLGVRVCEKMALY | 0.0001 | | | | 0.0003 | |
| LHGLSAFSL | IERLHGLSAFSLHSY | | | | | | |
| LHGPTPLLY | KPTLHGPTPLLYRLG | 0.0360 | | | | 0.0010 | |
| LHQNIVDVQ | LIHLHQNIVDVQYLY | | | | | | |
| LHSYSPGEI | AFSUHSYSPGEINRV | 0.0042 | | | | 0.0003 | |
| LIAFASRGN | MNRLIAFASRGNHVS | 0.0760 | 1.9000 | 0.0130 | 0.0058 | 0.0079 | 0.0650 |
| LIEANLLWR | DADLIEANLLWRQEM | 0.0088 | | | | 0.0010 | |
| LIFCHSKKK | GRHUFCHSKKKCDE | 0.0001 | | | | 0.0009 | |
| LITSCSSNV | DLELITSCSSNVSVA | | | | | | |
| LLALLSCLT | SIFLLALLSCLTVPA | | | | | | |
| LLFLLLADA | YVVLLFLLLADARVC | | | | | | |
| LLFNILAGGW | QNTLLFNILGGWVAA | | | | | | |
| LLLADARVC | LLFLLLADARVCACL | | | | | | |
| LLPAILSPG | LVNLLPAILSPGALV | | | | | | |
| LMGYIPLVG | FADUMGYIPLVGAPL | | | | | | |
| LNPSVAATL | VLVLNPSVAATLGFG | 1.8000 | 0.0120 | 0.0004 | | 2.1000 | 0.0035 |
| LPAILSPGA | VNLLPAILSPGALVV | | | | | | |
| LPALSTGLI | FTTLPALSTGLIHLH | 4.3000 | 0.0036 | 0.0016 | | 0.0071 | |
| LPFRGFRLG | VYLLPRRGPRLGVRA | 0.0140 | 0.4000 | 0.0360 | | 0.0014 | |
| LRDLAVAVE | HNGLRDLAVAVEPVV | | | | | | |
| LRKLGVPPL | ASCLRKLGVPPLRVW | 1.0000 | 0.5000 | 0.0920 | 0.0051 | 0.0000 | 0.4900 |
| LSAFSLHSY | LHGLSAFSLHSYSPG | 1.6000 | | | | 0.0095 | |
| LSAPSLKAT | ASQLSAPSLKATCTT | 0.0150 | | | | 0.0056 | |
| LSNSLLRHH | INALSNSLLRHHNMV | | | | | | |
| LSPGALVVG | PAILSPGALVVGVVC | | | | | | |
| LSPLLLSTT | RSELSPLLLSTTEWQ | | | | | | |
| LSPFRGSRPS | GWULSPRGSRSWGP | | | | | | |
| LSTGLIHLII | LPALSTGLIHLHQNI | | | | | | |
| LTCGFADLM | IDTLTCGFADLMGYI | 0.0017 | | | | 0.0024 | |
| LTHIDAHFL | FTGLTHIDAHFLSQT | 0.7600 | 0.6200 | 0.1300 | | 0.0005 | 0.0030 |
| LTSMLTDPS | VAVLTSMLTDPSHIT | | | | | | |
| LVAYQATVC | FPYLVAYQATVCARA | | | | | | |
| LVDILAGYG | GKVLVDILGYGAGV | | | | | | |
| LVGGVLAAL | TWVLVGGVLAALAAY | 0.7700 | 0.0011 | 0.0003 | | 0.0015 | |
| LVLNPSVAA | YKVLVLNPSVAATLG | | | | | | |
| LVNLLPAIL | TEDLVNLLPAILSPG | | | | | | |
| LVTRHADVI | DLYLVTRHADVIPVR | 0.0081 | 0.0220 | 0.0011 | | 0.0016 | |
| LVVGVVCAA | PGALVVGWCAAILR | | | | | | |
| LVVLATATP | GARLVVIATAPPGS | 0.0300 | 0.0009 | 0.0004 | | 0.8000 | |
| LWARMILMT | APTLWARMILMIHFF | | | | | | |
| LWRCGMGGN | ANLLWRQEMGGNITR | 0.7000 | | | | 0.0016 | |
| LYRLGAVQN | TPLLYRLGAVQNEVT | | | | | | |
| MAKNGVFCV | TRMAKNEVFCVOPE | 0.0014 | | | | 0.0036 | |
| MAWDMMMNW | GHRMAWDMMMNWSPT | 0.0280 | 0.0015 | 0.0044 | | 0.1600 | |
| MGGNITRME | RCEMGGNITRVESEN | 0.0001 | | | | 0.0003 | |
| MGYIPLVGA | ADLMGYIPLVGAPLG | 0.0006 | | | | 0.0060 | |
| MLTDPSHIT | LTSMLTDPSHITAET | 0.0004 | | | | 0.0740 | |
| MNRLIAFAS | VQWMNRLIAFASRGN | | | | | | |
| MTRYSAPPG | TEAMTRYSAPPGDPP | | | | | | |
| MWNFISGIQ | AKHMWNFISGIQYLA | 1.5000 | 0.0150 | 0.0570 | | 0.0040 | 0.0600 |
| MYVGGVEHR | KVRMYVGGVEHRLNA | | | | | | |
| VAGALVAFK | GNGVAGALVAFKVMS | | | | | | |
| VAHLHAPTG | TFQHLHAPTGSGK | | | | | | |
| VATDALMTG | VVVVATDALMTGYTG | 0.0048 | 0.0047 | 0.0014 | 1.1000 | | |
| VAYQATVCA | PYLVAYQATVCARAQ | | | | | | |
| VCAAILRRH | VGVVCAAILRPHVGP | | | | | | |
| VCEKMALYD | GVRVCEKMALYDVVS | 0.0022 | | | | 0.0012 | |
| VCQDHLEFW | GLPVCQDHLEFWESV | | | | 0.0063 | | |
| VCTRGVAKA | RAAVCTRGVAKAVDF | 0.0100 | | | | 0.0077 | |
| VFCVQPEKG | KNEVFCVCPEKGGRK | | | | | | |
| VFTDNSSPP | RSPVFTDNSSPPAVP | | | | | | |
| VFTGLTHD | WESVFTGLTHIDAHF | 0.0310 | | | | 0.0068 | |
| VGGVLAALA | WVLVGGVLAALAAYC | | | | | | |
| VGGVYLLPR | GQIVGGVYLLPRRGP | | | | | | |
| VGSCLPCEP | QYLVGSCLPCEPEPD | | | | | | |
| VGVVCAAIL | ALVVGVVCAAILRRH | | | | | | |
| VIDCNTCVT | FDSVIDCNTCVTQTV | | | | | | |
| VIDTLTCGF | LGKVIDTLTCGFADL | 0.0015 | | | | 0.0096 | |
| VLAALAAYC | VGGVLAALAAYCLTT | | | | | | |
| VLATATPPG | RLVVLATATPPGSVT | | | | | | |
| VLEDGVNYA | GVRVLEDGVNYATGN | 0.0007 | | | | 0.0086 | |
| VLNPSVAAT | KVLVLNPSVAATLQF | | | | | | |
| VLTSMLTDP | DVAVLTSMLTDPSHI | | | | | | |
| VLTTSCGNT | ASGVLTTSCGNTLTC | | | | | | |
| VLVDILAGY | LGKVLVDILAGYGAG | | | | | | |
| VLVGGVLAA | STWVLVGGVLAALAA | | | | | | |
| VLVLNPSVA | GYKVLVLNPSVAATL | 1.1000 | 0.0260 | 0.0004 | 0.0980 | 9.6000 | 0.0670 |
| VNLLPAILS | EDLVNLLPAILSPGA | 0.3700 | | | | 0.0110 | |
| VPESDAAAR | THYVPESDAAARVTQ | | | | | | |
| VTSTWVLVQ | LEVVTSTWVLVGGVL | 0.0120 | 0.0078 | −0.0003 | | 0.0280 | |
| VVATDALMT | DVVVNATDALMTGYT | 0.0110 | 0.0110 | −0.0003 | | 0.0180 | 0.0072 |
| VVCAAILRR | VVGVVCAAILRRHVQ | | | | | | |
| VVQVVCAAI | GALVVGVVCAAILRR | 0.0170 | | | | 0.0067 | |
| VVLATATPP | ARLVVLATATPPGSV | | | | | | |
| VYCFTPSFV | QGPVYCFTPSPVVVQ | 0.2700 | 0.0025 | −0.0003 | | 0.2600 | 0.4000 |
| WAGWLLSPR | GQGWAGWLLSPRGSR | | | | | | |
| WARMILMTH | PTLWARMILMTHFFS | 0.0064 | | | | 0.0200 | |
| WGADTAACQ | IITWGADTAACGDII | | | | | | |
| WGPTDPRRR | RPSWGPTDPRRRSRN | | | | | | |
| WMNRLIAFA | AVQWMNRLIAFASRG | 2.2000 | | | | 0.0035 | |
| WRLLAPITA | SKGWRLLAPITAYAQ | 14.0000 | 0.0730 | 0.8800 | −0.0006 | 2.1000 | 0.2500 |
| WTGALITPC | SYTWTGALITPCAAE | 0.0260 | 0.0007 | 0.0015 | | 0.0680 | 0.0220 |
| WYELTPAET | GCAWYELTPAETTVR | | | | | | |
| YATGNLPGC | GVNYATGNLPGCSFS | 0.0011 | | | | 0.0130 | |
| YCFTPSPVV | GPVYCFTPSPVVVQT | | | | | | |
| YDAGCAWYE | CECYDAGCAWYELTP | | | | | | |
| YDIIICDEC | GGAYDIIICDECHST | | | | | | |
| YDLELITSC | QPEYDLELITSCSSN | 0.0003 | | | | 0.0004 | |
| YGAGVAGAL | LAGYGAGVAGALVAF | 0.0410 | | | | −0.0003 | |
| YGRQYSFGQ | QSSYGPQYSPGQRVE | 0.4600 | 0.0001 | 0.0300 | 0.0007 | 0.1200 | 0.0510 |
| YGKFLADGG | YSTYGKPLADGGCSQ | | | | | | |
| YKVLVLNPS | AQGYKVLVLNPSVAA | 0.8400 | 0.0140 | 0.0004 | 0.0045 | 6.3000 | 0.1700 |
| YLAGLSTLP | GIQYLAGLSTLPGNP | | | | | | |
| YLKGSSGGP | PVSYLKGSSGGPLLC | | | | | | |
| YLTRDPTTP | RVYYLTRDPTTPLAR | | | | | | |
| YQATVCARA | LVAYQATVCARAQAP | | | | | | |
| YRGLDVSVI | VAYYRGLDVSVIPTS | | | | | | |
| YRLGAVQNE | PLLYFILGAVQNEVTL | | | | | | |
| YRRQRASGV | NCGYRRQRASGVLTT | | | | | | |
| YSIEPLDLP | GACYSIEPLDLPQII | | | | | | |
| YSPGEINRV | LHSYSPGEINRVASC | | | | −0.0017 | | |
| YVGDLCQSV | SAMYVGDLCGSVFLV | | | | | | |
| VQIYLLPNR | | | | | | | |
| 154 | | | | | | | |

| Core Sequence | DR5w11 | DR5w12 | DR6w19 | DR8w2 | DR7 | DR9 | DRw53 |
|---|---|---|---|---|---|---|---|
| FGAYMSKAH | | | | | | | |
| FGCTWMNST | 0.0210 | | 0.0001 | 0.0035 | 0.0250 | 0.0270 | |
| FKQKALGLL | | | | | 0.0058 | | |
| FLLALLSCL | | | | | | | |
| FPDLGVRVC | | | | | | | |
| FQVAHLHAP | | | | | 0.0003 | | |
| FRAAVCTRG | | | | | | | |
| FSIFLLALL | | | | | 0.0030 | | |
| FSLDPTFTI | | | | | 0.0005 | | |
| FTEAMTRYS | | | | | | | |
| FTPSPVVVG | 0.0056 | | 0.0001 | 0.0035 | 0.0740 | 0.1800 | |
| FTTLPALST | | | | | | | |
| FWAKHMWNF | | | | | | | |
| IDAHFLSQT | | | | | | | |
| IDCNTCVTQ | | | | | 0.0005 | | |
| IDTLTCGFA | | | | | | | |
| IEANLLWRQ | | | | | | | |
| IFLLALLSC | | | | | | | |
| ILGGWVAAQ | | | | | | | |
| ILGIGTVLD | | | | | | | |
| ILRRHVGPG | | | | | 0.0017 | | |
| ILSPGALW | | | | | | | |
| INAYTTGPC | | | | | | | |
| IPLVGAPLG | | | | | | | |
| ITRVESENK | | | | | | | |
| ITSCSSNVS | 0.0008 | | 0.0510 | 0.0003 | 0.0350 | 0.0330 | |
| IVFPDLGVR | | | | | 0.0004 | | |
| LAALAAYCL | | | | | | | |
| LADGGCSCG | | | | | | | |
| LAGLSTLPG | 1.7000 | | 0.0001 | | 0.0021 | 0.0550 | |
| LAGYGAGVA | | | | | | | |
| LATATPPGS | | | | | | | |
| LDPTFTIET | | | | | | | |
| LDQAETAGA | | | | | 0.0005 | | |
| LELITSCSS | | | | | | | |
| LEVVTSTWV | | | | | | | |
| LFLLLADAR | | | | | 0.0033 | | |
| LGGWVAAQL | | | | | | | |
| LGIGTVLDQ | | | | | | | |
| LGVRATRKT | | | | | | | |
| LGVRVCEKM | | | | | 0.0002 | | |
| LHGLSAFSL | | | | | | | |
| LHGPTPLLY | | | | | 0.0055 | | |
| LHQNIVDVQ | | | | | | | |
| LHSYSPGEI | | | | | 0.0024 | | |
| LIAFASRGN | 0.4400 | 0.0210 | 0.4800 | 0.4300 | 0.1100 | 0.2400 | |
| LIEANLLWR | | | | | 0.0025 | | |
| LIFCHSKKK | | | | | 0.0005 | | |
| LITSCSSNV | | | | | | | |
| LLALLSCLT | | | | | | | |
| LLFLLLADA | | | | | | | |
| LLFNILAGGW | | | | | | | |
| LLLADARVC | | | | | | | |
| LLPAILSPG | | | | | | | |
| LMGYIPLVG | | | | | | | |
| LNPSVAATL | 0.0140 | | 0.3100 | 0.0012 | 1.5000 | 3.2000 | |
| LPAILSPGA | | | | | | | |
| LPALSTGLI | 0.0130 | | 0.0002 | | 0.0400 | 0.0310 | |
| LPFRGFRLG | 0.0120 | | 0.0001 | | 0.0003 | 0.0032 | |
| LRDLAVAVE | | | | | | | |
| LRKLGVPPL | 0.0310 | 1.9000 | 0.0014 | 0.0730 | 0.0290 | 0.0007 | |
| LSAFSLHSY | | | | | 0.0070 | | |
| LSAPSLKAT | | | | | 0.0006 | | |
| LSNSLLRHH | | | | | | | |
| LSPGALVVG | | | | | | | |
| LSPLLLSTT | | | | | | | |
| LSPFRGSRPS | | | | | | | |
| LSTGLIHLII | | | | | | | |
| LTCGFADLM | | | | | 0.0003 | | |
| LTHIDAHFL | 0.0083 | | 0.0002 | 0.0500 | 0.1400 | 0.0056 | |
| LTSMLTDPS | | | | | | | |
| LVAYQATVC | | | | | | | |
| LVDILAGYG | | | | | | | |
| LVGGVLAAL | 0.0008 | | 0.0001 | | 0.0570 | 0.0058 | |
| LVLNPSVAA | | | | | | | |
| LVNLLPAIL | | | | | | | |
| LVTRHADVI | 0.0076 | | 0.0005 | | 0.0810 | 0.0620 | |
| LVVGVVCAA | | | | | | | |
| LVVLATATP | 0.0094 | | 0.0004 | | 0.0440 | 0.0067 | |
| LWARMILMT | | | | | | | |
| LWRCGMGGN | | | | | 0.0022 | | |
| LYRLGAVQN | | | | | | | |
| MAKNGVFCV | | | | | 0.0025 | | |
| MAWDMMMNW | 0.0079 | | 0.0000 | | 0.0017 | 0.0230 | |
| MGGNITRME | | | | | 0.0002 | | |
| MGYIPLVGA | | | | | 0.0018 | | |
| MLTDPSHIT | | | | | 0.0003 | | |
| MNRLIAFAS | | | | | | | |
| MTRYSAPPG | | | | | | | |
| MWNFISGIQ | 0.0076 | | 0.0004 | 0.0160 | 0.2300 | 0.2700 | |
| MYVGGVEHR | | | | | | | |
| VAGALVAFK | | | | | | | |
| VAHLHAPTG | | | | | | | |
| VATDALMTG | 0.0006 | | 0.0029 | 0.0029 | 0.0400 | | |
| VAYQATVCA | | | | | | | |
| VCAAILRRH | | | | | | | |
| VCEKMALYD | | | | | 0.0002 | | |
| VCQDHLEFW | | | | | | | |
| VCTRGVAKA | | | | | 0.0024 | | |
| VFCVQPEKG | | | | | | | |
| VFTDNSSPP | | | | | | | |
| VFTGLTHD | | | | | 0.0005 | | |
| VGGVLAALA | | | | | | | |
| VGGVYLLPR | | | | | | | |
| VGSCLPCEP | | | | | | | |
| VGVVCAAIL | | | | | | | |
| VIDCNTCVT | | | | | | | |
| VIDTLTCGF | | | | | 0.0079 | | |
| VLAALAAYC | | | | | | | |
| VLATATPPG | | | | | | | |
| VLEDGVNYA | | | | | −0.0002 | | |
| VLNPSVAAT | | | | | | | |
| VLTSMLTDP | | | | | | | |
| VLTTSCGNT | | | | | | | |
| VLVDILAGY | | | | | | | |
| VLVGGVLAA | | | | | | | |
| VLVLNPSVA | 0.1400 | 0.0520 | 0.6900 | 0.1700 | 0.2800 | 1.4000 | |
| VNLLPAILS | | | | | 0.0015 | | |
| VPESDAAAR | | | | | | | |
| VTSTWVLVQ | 0.0008 | | 0.0045 | | 0.1600 | 0.0120 | |
| VVATDALMT | −0.0004 | | 0.0140 | −0.0003 | 0.0910 | −0.0025 | |
| VVCAAILRR | | | | | | | |
| VVQVVCAAI | | | | | 0.0043 | | |
| VVLATATPP | | | | | | | |
| VYCFTPSFV | 0.0005 | | −0.0001 | 0.0011 | 0.2700 | 0.4300 | |
| WAGWLLSPR | | | | | | | |
| WARMILMTH | | | | | 0.0190 | | |
| WGADTAACQ | | | | | | | |
| WGPTDPRRR | | | | | | | |
| WMNRLIAFA | | | | | 0.0205 | | |
| WRLLAPITA | 4.2000 | 0.0290 | −0.0001 | 0.9000 | 0.0260 | 0.0630 | |
| WTGALITPC | 0.0031 | | −0.0001 | 0.0130 | 0.4900 | 0.0750 | |
| WYELTPAET | | | | | | | |
| YATGNLPGC | | | | | −0.0003 | | |
| YCFTPSPVV | | | | | | | |
| YDAGCAWYE | | | | | | | |
| YDIIICDEC | | | | | | | |
| YDLELITSC | | | | | −0.0002 | | |
| YGAGVAGAL | | | | | 0.0008 | | |
| YGRQYSFGQ | 0.0010 | 0.0003 | 0.1800 | 0.0007 | 0.1600 | 1.1000 | |
| YGKFLADGG | | | | | | | |
| YKVLVLNPS | 0.2700 | 0.0370 | 0.5900 | 0.2800 | 0.0300 | 0.2000 | |
| YLAGLSTLP | | | | | | | |
| YLKGSSGGP | | | | | | | |
| YLTRDPTTP | | | | | | | |
| YQATVCARA | | | | | | | |
| YRGLDVSVI | | | | | | | |
| YRLGAVQNE | | | | | | | |
| YRRQRASGV | | | | | | | |
| YSIEPLDLP | | | | | | | |
| YSPGEINRV | | | | | | | |
| YVGDLCQSV | | | | | | | |
| VQIYLLPNR | | | | | | | |
| 154 | | | | | | | |

TABLE XXa
HCV DR 3A Motif Binding Data Not Included

| | | | | | | |
|---|---|---|---|---|---|---|
| Core | Core | Core | Exemplary | Position In | Exemplary Sequence | Exemplary Sequence |
| Sequence | Freq. | Conservancy (%) | Sequence | HCV Poly-protein | Frequency | Conservancy (%) |

| | | | | | | |
|---|---|---|---|---|---|---|
| FLADGGCSG | 11 | 79 | YGKFLADGGCSGGAY | 1301 | 10 | 71 |
| FSLDPTFTI | 14 | 100 | TVDFSLDPTFTIETT | 1466 | 11 | 79 |
| LEGEPGDPD | 14 | 100 | MPPLEGEPGDPDLSD | 2401 | 11 | 19 |
| LPCEPEPDV | 12 | 86 | GSQLPCEPEPDVAVL | 2162 | 9 | 64 |
| MAWDMMMNW | 12 | 86 | GHRMAWDMMMNWSPT | 315 | 12 | 86 |
| MLTDPSHIT | 14 | 100 | LTSMLTDPSHITAET | 2176 | 6 | 57 |
| MSADLEVVT | 11 | 79 | MACMSADLEVVTSTW | 1651 | 6 | 43 |
| VATDALMTG | 12 | 86 | VVVVATDALMTGYTG | 1437 | 6 | 43 |
| VCQDHLEFW | 12 | 86 | GLPVCQDHLEFWESV | 1552 | 6 | 43 |
| VFPDLGVRV | 11 | 79 | RLIVFPDLGVRVCEK | 2611 | 11 | 79 |
| VFTDNSSPP | 11 | 79 | RSPVFTDNSSPPAVP | 1211 | 10 | 71 |
| VLCECYDAG | 13 | 93 | DSSVLCECYDAQCAW | 1510 | 10 | 71 |
| VLEDGVNYA | 12 | 06 | GVIIVLEDGVNYAIGN | 154 | 12 | 80 |
| VLVDILAGY | 11 | 79 | LGKVLVDILAGYGAG | 1049 | 10 | 71 |
| VQPEKGGRK | 11 | 79 | VFCVQPEKGGFKPAR | 2597 | 11 | 79 |
| YDLELITSC | 13 | 93 | QPEYDLELITSCSSN | 2008 | 11 | 79 |
| YSIEPLDLP | 11 | 79 | GACYSIEPLDLPQII | 2902 | 6 | 43 |
| YVGDLCGSV | 12 | 86 | SAMYVGDLCGSVFLV | 273 | 8 | 57 |
| YVPESDAAA | 12 | 86 | PTHYVPESDAAATIVT | 1936 | 12 | 86 |
| 19 | | | | | | |

TABLE XXb
HCV DR 3A Motif With Binding Information

| | | | | | | | | |
|---|---|---|---|---|---|---|---|---|
| Core | Exemplary | | | | | | | |
| Sequence | Sequence | DR3 | DR1 | DR2w201 | DR2w202 | DR4w4 | DR4w15 | DR5w11 |

| | | | | | | | |
|---|---|---|---|---|---|---|---|
| FLACGGCSG | YGKFLADGGCSGGAY | | | | | | |
| FSLDPTFTI | TVDFSLDPTFTIETT | | 0.0001 | | | 0.1600 | |
| LEGEPGDPD | MPPLEGEPGDPDLSD | −0.0017 | | | | | |
| LPCEPEPDV | GSQLPCEPEPDVAVL | −0.0017 | | | | | |
| MAWDMMMNW | GHRMAWDMMMNWSPT | | 0.0280 | 0.0015 | 0.0044 | 0.1600 | 0.0079 |
| MLTDPSHIT | LTSMLTDPSHITAET | | 0.0004 | | | 0.0740 | |
| MSADLEVVT | MACMSADLEVVTSTW | | | | | | |
| VATDALMTG | VVVVATDALMTGYTG | 1.1000 | 0.0048 | 0.0047 | 0.0014 | | 0.0006 |
| VCQDHLEFW | GLPVCQDHLEFWESV | 0.0063 | | | | | |
| VFPDLGVRV | RLIVFPDLGVRVCEK | | | | | | |
| VFTDNSSPP | RSPVFTDNSSPPAVP | | | | | | |
| VLCECYDAG | DSSVLCECYDAGCAW | −0.0017 | | | | | |
| VLEDGVNYA | GVRVLEDGVNYATGN | | 0.0007 | | | 0.0006 | |
| VLVDILAGY | LGKVLVDILAGYGAG | | | | | | |
| VQPEKGGRK | VFCVQPEKGGRKPAR | | | | | | |
| YDLELITSC | QPEYDLELITSCSSN | | 0.0003 | | | 0.0004 | |
| YSIEPLDLP | GACYSIEPLDLPQII | | | | | | |
| YVGDLCGSV | SAMYVGDLCGSVFLV | −0.0017 | | | | | |
| YVPESDAAA | PTHYVPESDAAARVT | 0.0220 | | | | | |
| 19 | | | | | | | |

| | | | | | | | |
|---|---|---|---|---|---|---|---|
| Core | Exemplary | | | | | | |
| Sequence | Sequence | DR5w12 | DR6w19 | DR7 | DR8w2 | DR9 | DRw53 |

| | | | | | |
|---|---|---|---|---|---|
| FLACGGCSG | YGKFLADGGCSGGAY | | | | |
| FSLDPTFTI | TVDFSLDPTFTIETT | | 0.0005 | | |
| LEGEPGDPD | MPPLEGEPGDPDLSD | | | | |
| LPCEPEPDV | GSQLPCEPEPDVAVL | | | | |
| MAWDMMMNW | GHRMAWDMMMNWSPT | 0.0080 | 0.0017 | | 0.0230 |
| MLTDPSHIT | LTSMLTDPSHITAET | | −0.0003 | | |
| MSADLEVVT | MACMSADLEVVTSTW | | | | |
| VATDALMTG | VVVVATDALMTGYTG | 0.0029 | 0.0400 | 0.0029 | |
| VCQDHLEFW | GLPVCQDHLEFWESV | | | | |
| VFPDLGVRV | RLIVFPDLGVRVCEK | | | | |
| VFTDNSSPP | RSPVFTDNSSPPAVP | | | | |
| VLCECYDAG | DSSVLCECYDAGCAW | | | | |
| VLEDGVNYA | GVRVLEDGVNYATGN | | −0.0002 | | |
| VLVDILAGY | LGKVLVDILAGYGAG | | | | |
| VQPEKGGRK | VFCVQPEKGGRKPAR | | | | |
| YDLELITSC | QPEYDLELITSCSSN | | | −0.0002 | |
| YSIEPLDLP | GACYSIEPLDLPQII | | | | |
| YVGDLCGSV | SAMYVGDLCGSVFLV | | | | |
| YVPESDAAA | PTHYVPESDAAARVT | | | | |
| 19 | | | | | |

TABLE XXc
HCV 3B Motif

| | | | | | | |
|---|---|---|---|---|---|---|
| Core | Core | Core | Exemplary | Position In | Exemplary Sequence | Exemplary Sequence |
| Sequence | Freq. | Conservancy (%) | Sequence | HCV Poly-protein | Frequency | Conservancy (%) |

| | | | | | | |
|---|---|---|---|---|---|---|
| FCHSKKKCD | 14 | 100 | HLIFCHSKKKCDELA | 1395 | 14 | 100 |
| FSYDTRCFD | 11 | 79 | PMGFSYDTRCFDSTV | 2667 | 11 | 79 |
| LAEQFKQKA | 12 | 86 | GMCLAEQFKQKALGL | 1726 | 8 | 57 |
| LKPTLHGPT | 11 | 79 | LIRLKPTLHGPTPLL | 1616 | 10 | 71 |
| VRATRKTSE | 11 | 79 | RLGVRATRKTSERSQ | 43 | 10 | 71 |
| YLVTRHADV | 12 | 86 | SDLYLVIRHADVIPV | 1133 | 11 | 79 |
| MSTNPKPQR | 11 | 79 | | 1 | | |
| 7 | | | | | | |

TABLE XXd
HCV 3B Motif Binding Data

| Core | Exemplary | | | | | | | |
|---|---|---|---|---|---|---|---|---|
| Sequence | Sequence | DR1 | DR2w2B1 | DR2w2B2 | DR3 | DR4w4 | DR4w15 | DR5w11 |
| FQHSKKKCD | HLIFCHSKKKCDELA | | | | | | | |
| FSYDTRCFD | PMGFSYDTRCFDSTV | | | | | | | |
| LAEQFKQKA | GMCLAEQFKQKALGL | | | | 0.0190 | | | |
| LKPTLHGPT | LIRLKPTLHGPTPLL | | | | | | | |
| VRATRKTSE | RLGVRATRKTSERSQ | | | | | | | |
| YLVTRHADV | SDLYLVTRHADVIPV | | | | 0.0022 | | | |
| MSTNPKPQR | SDLYLVTRHADVIPV | | | | | | | |
| 7 | | | | | | | | |

| Core | Exemplary | | | | | | |
|---|---|---|---|---|---|---|---|
| Sequence | Sequence | DR5w12 | DR6w19 | DR6w2 | DR7 | DR9 | DRw53 |
| FQHSKKKCD | HLIFCHSKKKCDELA | | | | | | |
| FSYDTRCFD | PMGFSYDTRCFDSTV | | | | | | |
| LAEQFKQKA | GMCLAEQFKQKALGL | | | | | | |
| LKPTLHGPT | LIRLKPTLHGPTPLL | | | | | | |
| VRATRKTSE | RLGVRATRKTSERSQ | | | | | | |
| YLVTRHADV | SDLYLVTRHADVIPV | | | | | | |
| MSTNPKPQR | SDLYLVTRHADVIPV | | | | | | |
| 7 | | | | | | | |

TABLE XXI
Population coverage with combined HLA Supertypes

| | PHENOTYPIC FREQUENCY | | | | | |
|---|---|---|---|---|---|---|
| | | North | | | | |
| | Cau- | American | Japa- | Chi- | His- | Aver- |
| HLA-SUPERTYPES | casian | Black | nese | nese | panic | age |
| a. Individual | | | | | | |
| Supertypes | | | | | | |
| A2 | 45.8 | 39.0 | 42.4 | 45.9 | 43.0 | 43.2 |
| A3 | 37.5 | 42.1 | 45.8 | 52.7 | 43.1 | 44.2 |
| B7 | 38.6 | 52.7 | 48.8 | 35.5 | 47.1 | 44.7 |
| A1 | 47.1 | 16.1 | 21.8 | 14.7 | 26.3 | 25.2 |
| A24 | 23.9 | 38.9 | 58.6 | 40.1 | 38.3 | 40.0 |
| B44 | 43.0 | 21.2 | 42.9 | 39.1 | 39.0 | 37.0 |
| B27 | 28.4 | 26.1 | 13.3 | 13.9 | 35.3 | 23.4 |
| B62 | 12.6 | 4.8 | 36.5 | 25.4 | 11.1 | 18.1 |
| B58 | 10.0 | 25.1 | 1.6 | 9.0 | 5.9 | 10.3 |
| b. Combined | | | | | | |
| Supertypes | | | | | | |
| A2, A3, B7 | 83.0 | 86.1 | 87.5 | 88.4 | 86.3 | 86.2 |
| A2, A3, B7, A24, | 99.5 | 98.1 | 100.0 | 99.5 | 99.4 | 99.3 |
| B44, A1 | | | | | | |
| A2, A3, B7, A24, | 99.9 | 99.6 | 100.0 | 99.8 | 99.9 | 99.8 |
| B44, A1, B27, B62, | | | | | | |
| B58 | | | | | | |

TABLE XXII
HCV ANALOGS

| | | | | | | | | |
|---|---|---|---|---|---|---|---|---|
| | | | | A2 | A3 | | B7 | 1° |
| | | Fixed | A1 | Super | Super | A24 | Super | Anchor |
| AA | Sequence | Nomen. | Motif | Motif | Motif | Motif | Motif | Fixer |

| | | | | | | | | |
|---|---|---|---|---|---|---|---|---|
| 9 | RVXEKMALY | | N | N | Y | N | N | |
| 9 | AVXTRGVAK | | N | N | Y | N | N | |
| 9 | EVFXVQPEK | | N | N | Y | N | N | |
| 9 | HLIFXHSKK | | N | N | Y | N | N | |
| 9 | LPGXSFSIF | | N | N | N | N | Y | |
| 9 | LIFXHSKKK | | N | N | Y | N | N | |
| 10 | VLAALAAYXL | | N | Y | N | N | N | No |
| 10 | HLIFXHSKKK | | N | N | Y | N | N | |
| 10 | AAXNWTRGER | | N | N | Y | N | N | |
| 10 | YLLPRRGPRV | L2.LV10 | N | Y | N | N | N | |
| 9 | FPGCSFSIF | | N | N | N | N | Y | |
| 9 | LPVCSFSIF | | N | N | N | N | Y | |
| 9 | LPGCSFSYF | | N | N | N | N | Y | |
| 9 | LPGCMFSIF | | N | N | N | N | Y | |
| 9 | LPFCSFSIF | | N | N | N | N | Y | |
| 9 | LPGCSFSPF | | N | N | N | N | Y | |
| 9 | LPGCSFSII | | N | N | N | N | Y | |
| 9 | PPVVHGCPI | | N | N | N | N | Y | |
| 10 | KPTLHGPTPI | | N | N | N | N | Y | |
| 10 | APTLWARMII | | N | N | N | N | Y | |
| 9 | SPRGSRPSI | | N | N | N | N | Y | |
| 10 | LPRRGPRLGI | | N | N | N | N | Y | |
| 9 | SPGQRVEFI | | N | N | N | N | Y | |
| 9 | LPGCSFSII | | N | N | N | N | Y | |
| 9 | DPRRRSRNI | | N | N | N | N | Y | |
| 10 | SPGALVVGVI | | N | N | N | N | Y | |
| 10 | TPLLYRLGAI | | N | N | N | N | Y | |
| 9 | TISGVLWQV | | N | Y | N | N | N | No |
| 9 | SISGVLWQV | | N | Y | N | N | N | No |
| 9 | SLMAFTASV | | N | Y | N | N | N | No |
| 9 | GLRDCTMLV | | N | Y | N | N | N | No |
| 10 | KLVALGVNAV | | N | Y | N | N | N | No |
| 10 | YLLPSRGPKL | | N | Y | N | N | N | No |
| 10 | KLSGLGLNAV | | N | Y | N | N | N | No |
| 10 | YVLPRRGPRL | LV2.L10 | N | Y | N | N | N | Rev |
| 10 | VFFNILGGWV | | N | N | N | N | N | |
| 10 | KLVSLGVNAV | | N | Y | N | N | N | No |
| 9 | CINGVCWTA | I2.VA9 | N | Y | N | N | N | Rev |
| 9 | CANGVCWTV | IA2.V9 | N | Y | N | N | N | Rev |
| 9 | CVNGVCWAV | | N | Y | N | N | N | |
| | 40 | | | | | | | |

TABLE XXIII
Immunogenicity of identified supermotif-bearing peptides

| Immunogenicity | |
|---|---|
| Human^{a} | Transgenic mice^{b} |

| | | | | | | | | | | | |
|---|---|---|---|---|---|---|---|---|---|---|---|
| | | | | Po- | Barnaba; | Barnaba; | | | over- | Fre- | |
| Supermotif | Peptide | Sequence | Protein | sition | patients | contacts | Chisari | Pape | all | quency | Response |

| | | | | | | | | | | | |
|---|---|---|---|---|---|---|---|---|---|---|---|
| A2 | 1073.05 | LLFNILGGWV | NS4 | 1812 | 1/6 | 7/17 | 2/21 | 0/6 | 10/50 | 6/6 | 6.4 (1.7) |
| | 1090.18 | FLLLADARV | NS1/E2 | 728 | 2/6 | 7/17 | 1/21 | 0/6 | 10/50 | 5/6 | 9.5 (3.0) |
| | 1013.02 | YLVAYQATV | NS4 | 1590 | 1/6 | 4/17 | 1/21 | 0/6 | 6/50 | 5/6 | 8.5 (3.7) |
| | 1090.22 | RLIVFPDLGV | NS5 | 2578 | 2/6 | 5/17 | 0/21 | 0/6 | 7/50 | 0/6 | — |
| | 1013.1002 | DLMGYIPLV | Core | 132 | 2/6 | 7/17 | 1/21 | 1/6 | 11/50 | 5/6 | 8.8 (2.6) |
| | 24.0073 | WMNRLIAFA | NS4 | 1920 | 1/6 | 3/17 | 2/21 | 1/6 | 7/50 | 0/6 | — |
| | 24.0075 | VLVGGVLAA | NS4 | 1666 | 1/6 | 6/17 | 3/21 | 1/6 | 11/50 | 0/6 | — |
| | 1174.08 | HMWNFISGI | NS4 | 1769 | 3/6 | 3/17 | 2/21 | 0/6 | 8/50 | 6/6 | 6.4 (1.7) |
| | 1073.06 | ILAGYGAGV | NS4 | 1851 | 2/6 | 3/17 | 0/21 | 0/6 | 5/50 | 3/6 | 54.7 (3.3) |
| | 1073.07 | YLLPRRGPRL | CORE | 35 | 2/6 | 5/17 | 7/21 | 1/6 | 17/50 | 4/6 | 59.1 (7.2) |
| | 24.0071 | LLFLLLADA | NS1/E2 | 726 | 2/6 | 9/17 | 0/21 | 0/6 | 11/50 | 0/6 | — |
| | 1.0119 | YLVTRHADV | NS3 | 1131 | 6/6 | 10/17 | 0/21 | 1/6 | 17/50 | 0/6 | — |
| A3 | 1.0952 | KTSERSQPR | CORE | 51 | 2/16 | 1/4 | 3/12 | 0/6 | 6/38 | 3/6 | 23.4 (1.3) |
| | 1073.11 | RLGVRATRK | CORE | 43 | 4/16 | 1/4 | 7/12 | 1/6 | 13/38 | 3/6 | 42.2 (1.2) |
| | 1.0955 | QLFTFSPRR | ENV | 290 | 1/16 | 0/4 | 6/12 | 1/6 | 8/38 | | |
| | 1073.13 | RMYVGGVEHR | NS1/E2 | 632 | 5/16 | 1/4 | 4/12 | 1/6 | 11/38 | 2/6 | 2.8 (1.1) |
| | 1.0123 | LIFCHSKKK | NS3 | 1396 | 6/16 | 1/4 | 4/12 | 2/6 | 13/38 | 3/6 | 4.4 (1.1) |
| | 1073.10 | GVAGALVAFK | NS4 | 1863 | 3/16 | 0/4 | 6/12 | 2/6 | 11/38 | 6/6 | 56.5 (1.7) |
| | 24.0090 | VAGALVAFK | NS4 | 1864 | 4/16 | 1/4 | 6/12 | 0/4 | 11/38 | 1/6 | 7.1 |
| | 24.0086 | TLGFGAYMSK | NS3 | 1262 | 6/16 | | 2/12 | 2/5 | 10/33 | | |
| B7 | 1145.12 | LPGCSFSIF | CORE | 169 | | | 2 | 3/10 | 5 | | |

TABLE XXIV

Human and murine MHC-peptide binding assays established using
purified MHC molecules and gel filtration chromatography

| | | | | Radiolabeled peptide | | |
|---|---|---|---|---|---|---|
| Species | Antigen | Allele | Cell line | Source | Sequence | Notes |

A. Class I binding assays

| | | | | | | |
|---|---|---|---|---|---|---|
| Human | A1 | A*0101 | Steinlin | Hu. J chain 102-110 | YTAVVPLVY | no NEN in |
| | | | | | | PI cocktail |
| | A2 | A*0201 | JY | HBVc 18-27 F6->Y | FLPSDYFPSV | no NEN in |
| | | | | | | PI cocktail |
| | A2 | A*0202 | P815 | HBVc 18-27 F6->Y | FLPSDYFPSV | no NEN in |
| | | | (transfected) | | | PI cocktail |
| | A2 | A*0203 | FUN | HBVc 18-27 F6->Y | FLPSDYFPSV | no NEN in |
| | | | | | | PI cocktail |
| | A2 | A*0206 | CLA | HBVc 18-27 F6->Y | FLPSDYFPSV | no NEN in |
| | | | | | | PI cocktail |
| | A2 | A*0207 | 721.221 | HBVc 18-27 F6->Y | FLPSDYFPSV | no NEN in |
| | | | (transfected) | | | PI cocktail |
| | A3 | | GM3107 | non-natural (A3CON1) | KVFPYALINK | no NEN in |
| | | | | | | PI cocktail |
| | A11 | | BVR | non-natural (A3CON1) | KVFPYALINK | no NEN in |
| | | | | | | PI cocktail |
| | A24 | A*2402 | KAS116 | non-natural (A24CON1) | AYIDNYNKF | no NEN in |
| | | | | | | PI cocktail |
| | A31 | A*3101 | SPACH | non-natural (A3CON1) | KVFPYALINK | no NEN in |
| | | | | | | PI cocktail |
| | A33 | A*3301 | LWAGS | non-natural (A3CON1) | KVFPYALINK | no NEN in |
| | | | | | | PI cocktail |
| | A28/68 | A*6801 | C1R | HBVc 141-151 T7->Y | STLPETYVVRR | no NEN in |
| | | | | | | PI cocktail |
| | A28/68 | A*6802 | AMAI | HBV pol 646-654 C4->A | FTQAGYPAL | no NEN in |
| | | | | | | PI cocktail |
| | B7 | B*0702 | GM3107 | A2 sigal seq. 5-13 (L7->Y) | APRTLVYLL | no NEN in |
| | | | | | | PI cocktail |
| | B8 | B*0801 | Steinlin | IIVgp 586-593 Y1->F, Q5-> | FLKDYQLL | no NEN in |
| | | | | | | PI cocktail |
| | B27 | B*2705 | LG2 | R 60s | FRYNGLIHR | no NEN in |
| | | | | | | PI cocktail |
| | B35 | B*3501 | C1R, BVR | non-natural (B35CON2) | FPFKYAAAF | no NEN in |
| | | | | | | PI cocktail |
| | B35 | B*3502 | TISI | non-natural (B35CON2) | FPFKYAAAF | no NEN in |
| | | | | | | PI cocktail |
| | B35 | B*3503 | EHM | non-natural (B35CON2) | FPFKYAAAF | no NEN in |
| | | | | | | PI cocktail |
| | B44 | B*4403 | PITOUT | EF-1 G6->Y | AEMGKYSFY | no NEN in |
| | | | | | | PI cocktail |
| | B51 | | KAS116 | non-natural (B35CON2) | FPFKYAAAF | no NEN in |
| | | | | | | PI cocktail |
| | B53 | B*5301 | AMAI | non-natural (B35CON2) | FPFKYAAAF | no NEN in |
| | | | | | | PI cocktail |
| | B54 | B*5401 | KT3 | non-natural (B35CON2) | FPFKYAAAF | no NEN in |
| | | | | | | PI cocktail |
| | Cw4 | Cw*0401 | C1R | non-natural (C4CON1) | QYDDAVYKL | no NEN in |
| | | | | | | PI cocktail |
| | Cw6 | Cw*0602 | 721.221 | non-natural (C6CON1) | YRHDGGNVL | no NEN in |
| | | | transfected | | | PI cocktail |
| | Cw7 | Cw*0702 | 721.221 | non-natural (C6CON1) | YRHDGGNVL | no NEN in |
| | | | transfected | | | PI cocktail |
| Mouse | D^{b} | | EL4 | Adenovirus E1A P7->Y | SGPSNTYPEI | no NEN in |
| | | | | | | PI cocktail |
| | K^{b} | | EL4 | VSV NP 52-59 | RGYVFQGL | no NEN in |
| | | | | | | PI cocktail |
| | D^{d} | | P815 | HIV-IIIB ENV G4->Y | RGPYRAFVTI | no NEN in |
| | | | | | | PI cocktail |
| | K^{d} | | P815 | non-natural (KdCON1) | KFNPMKTYI | no NEN in |
| | | | | | | PI cocktail |
| | L^{d} | | P815 | HBVs 28-39 | IPQSLDSYWTSL | no NEN in |
| | | | | | | PI cocktail |

B. Class II binding assays

| | | | | | | |
|---|---|---|---|---|---|---|
| Human | DR1 | DRB1*0101 | LG2 | HA Y307-319 | YPKYVKQNTLKLAT | |
| | DR2 | DRB1*1501 | L466.1 | MBP 88-102Y | VVHFFKNIVTPRTPPY | |
| | DR2 | DRB1*1601 | L242.5 | non-natural (760.16) | YAAFAAAKTAAAFA | |
| | DR3 | DRB1*0301 | MAT | MT 65 kD Y3-13 | YKTIAFDEEARR | optimal assay |
| | | | | | | pH is 4.5 |
| | DR4w4 | DRB1*0401 | Preiss | non-natural (717.01) | YARFQSQTTLKQKT | |
| | DR4w10 | DRB1*0402 | YAR | non-natural (717.10) | YARFQRQTTLKAAA | |
| | DR4w14 | DRB1*0404 | BIN 40 | non-natural (717.01) | YARFQSQTTLKQKT | |
| | DR4w15 | DRB1*0405 | KT3 | non-natural (717.01) | YARFQSQTTLKQKT | |
| | DR7 | DRB1*0701 | Pitout | Tet. tox. 830-843 | QYIKANSKFIGITE | |
| | DR8 | DRB1*0802 | OLL | Tet. tox. 830-843 | QYIKANSKFIGITE | |
| | DR8 | DRB1*0803 | LUY | Tet. tox. 830-843 | QYIKANSKFIGITE | |
| | DR9 | DRB1*0901 | HID | Tet. tox. 830-843 | QYIKANSKFIGITE | |
| | DR11 | DRB1*1101 | Sweig | Tet. tox. 830-843 | QYIKANSKFIGITE | |
| | DR12 | DRB1*1201 | Herluf | unknown eluted peptide | EALIHQLKINPYVLS | |
| | DR13 | DRB1*1302 | H0301 | Tet. tox. 830-843 S->A | QYIKANAKFIGITE | |
| | DR51 | DRB5*0101 | GM3107 | Tet. tox. 830-843 | QYIKANAKFIGITE | |
| | | | or L416.3 | | | |
| | DR51 | DRB5*0201 | L255.1 | HA 307-319 | PKYVKQNTLKLAT | |
| | DR52 | DRB3*0101 | MAT | Tet. tox. 1272-1284 | NGQIGNDPNRDIL | |
| | DR53 | DRB4*0101 | L257.6 | non-natural (717.01) | YARFQSQTTLKQKT | no NEM in PI mix |
| | DQ3.1 | DQA1*0301/ | PF | non-natural (ROIV) | YAHAAHAAHAAHAAHAA | |
| | | DQB1*0301 | | | | |
| Mouse | IA^{b} | | DB27.4 | non-natural (ROIV) | YAHAAHAAHAAHAAHAA | optimal assay |
| | | | | | | pH is 5.5 |
| | IA^{d} | | A20 | non-natural (ROIV) | YAHAAHAAHAAHAAHAA | |
| | IA^{k} | | CH-12 | HEL 46-61 | YNTDGSTDYGILQINSR | optimal assay |
| | | | | | | pH is 5.0 |
| | IA^{s} | | LS102.9 | non-natural (ROIV) | YAHAAHAAHAAHAAHAA | |
| | IA^{u} | | 91.7 | non-natural (ROIV) | YAHAAHAAHAAHAAHAA | |
| | IE^{d} | | A20 | Lambda repressor 12-26 | YLEDARRKKAIYEKKK | optimal assay |
| | | | | | | pH is 5.0 |
| | IE^{k} | | CH-12 | Lambda repressor 12-26 | YLEDARRKKAIYEKKK | optimal assay |
| | | | | | | pH is 5.0 |

TABLE XXV
Monoclonal antibodies used in MHC purification.

| Monoclonal antibody | Specificity |
|---|---|
| W6/32 | HLA-class I |
| B123.2 | HLA-B and C |
| IVD12 | HLA-DQ |
| LB3.1 | HLA-DR |
| M1/42 | H-2 class I |
| 28-14-8S | H-2 D^{b} and L^{d} |
| 34-5-8S | H-2 D^{d} |
| B8-24-3 | H-2 K^{b} |
| SF1-1.1.1 | H-2 K^{d} |
| Y-3 | H-2 K^{b} |
| 10.3.6 | H-2 IA^{k} |
| 14.4.4 | H-2 IE^{d}, IE^{K} |
| MKD6 | H-2 IA^{d} |
| Y3JP | H-2 IA^{b}, IA^{s}, IA^{u} |

TABLE XXVI
HCV-derived conserved high algorithm A*0201-binding peptides

A2-supertype
binding capacity (IC50 nM)

| | | | | | | | | | | |
|---|---|---|---|---|---|---|---|---|---|---|
| Peptide | Molecule | 1st Position | Sequence | Consv. | A*0201 | A*0202 | A*0203 | A*0206 | A*6802 | A2 XRN |

| | | | | | | | | | | |
|---|---|---|---|---|---|---|---|---|---|---|
| 1073.05 | NS4 | 1812 | LLFNILGGWV | 85 | 4.2 | 113 | 3.2 | 19 | 33 | 5 |
| 1090.18 | NS1/E2 | 728 | FLLLADARV | 92 | 18 | 90 | 149 | 247 | 111 | 5 |
| 1013.02 | NS4 | 1590 | YLVAYQATV | 85 | 20 | 39 | 16 | 82 | 33 | 5 |
| 1090.22 | NS5 | 2611 | RLIVFPDLGV | 79 | 56 | 391 | 10 | 370 | 8000 | 4 |
| 1013.1002 | CORE | 132 | DLMGYIPLV | 79 | 80 | 4778 | 204 | 481 | 12 | 4 |
| 24.0073 | NS4 | 1920 | WMNRLIAFA | 100 | 122 | 130 | 3.3 | 1609 | 400 | 4 |
| 24.0075 | NS4 | 1666 | VLVGGVLAA | 85 | 185 | 331 | 32 | 308 | 3077 | 4 |
| 1174.08 | NS4 | 1769 | HMWNFISGI | 92 | 15 | 10750 | 77 | 132 | 7547 | 3 |
| 1073.06 | NS4 | 1851 | ILAGYGAGV | 79 | 116 | 143 | 5.0 | 755 | 889 | 3 |
| 1073.07 | CORE | 35 | YLLPRRGPRL | 92 | 125 | 6143 | 455 | 416 | 10256 | 3 |
| 24.0071 | NS1/E2 | 726 | LLFLLLADA | 100 | 217 | 287 | 455 | 3364 | 3077 | 3 |
| 1.0119 | LORF | 1131 | YLVTRHADV | 85 | 455 | 2048 | 3.6 | 71 | 3077 | 3 |
| 24.0065 | NS4 | 1891 | ILSPGALVV | 92 | 238 | 10750 | 27 | 1028 | 3077 | 2 |
| 1013.12 | NS1/E2 | 686 | ALSTGLIHL | 85 | 313 | 7167 | 45 | 18500 | 10256 | 2 |
| 939.14 | NS1/E2 | 696 | HLHQNIVDV | 85 | 500 | 3071 | 19 | 1370 | 10811 | 2 |
| 1090.21 | NS5 | 2918 | RLHGLSAFSL | 79 | 179 | 782 | 625 | 18500 | 12500 | 1 |

TABLE XXVII
HCV-derived conserved high algorithm A*03 and/or A*11 binding peptides

| | | | | | A3-supertype binding capacity (IC50 nM) | | | | | |
|---|---|---|---|---|---|---|---|---|---|---|
| Peptide | Molecule | 1st Position | Sequence | Consv. | A*03 | A*11 | A*3101 | A*3301 | A*6801 | A3 XRN |

| | | | | | | | | | | |
|---|---|---|---|---|---|---|---|---|---|---|
| 1.0952 | CORE | 51 | KTSERSQPR | 92 | 69 | 94 | 67 | 1813 | 145 | 4 |
| 1073.11 | CORE | 43 | RLGVRATRK | 79 | 12 | 207 | 429 | — | — | 3 |
| 1.0955 | ENV1 | 290 | QLFTFSPRR | 79 | 15 | 182 | 621 | 3766 | 3 | 3 |
| 1073.13 | NS1/E2 | 632 | RMYVGGVEHR | 100 | 15 | 300 | 95 | 9667 | 1778 | 3 |
| 1.0123 | NS3 | 1396 | LIFCHSKKK | 100 | 20 | 32 | 2535 | 24167 | 333 | 3 |
| 1073.10 | NS4 | 1863 | GVAGALVAFK | 85 | 28 | 4 | 3273 | 26364 | 118 | 3 |
| 24.0090 | NS4 | 1864 | VAGALVAFK | 85 | 46 | 7 | 3750 | 11600 | 258 | 3 |
| 24.0086 | NS3 | 1262 | LGFGAYMSK | 85 | 136 | 21 | 2950 | 22308 | 222 | 3 |
| 1174.16 | NS1/E2 | 557 | WMNSTGFTK | 79 | 208 | 74 | 12857 | 690 | 1429 | 2 |
| 1073.14 | NS3 | 1261 | TLGFGAYMSK | 85 | 136 | 98 | — | 22308 | 8889 | 2 |
| 1090.23 | LORF | 1183 | AVCTRGVAK | 79 | 423 | 240 | 16364 | — | — | 2 |
| 1090.24 | NS5 | 2596 | EVFCVQPEK | 85 | 13750 | 222 | — | — | 18 | 2 |
| 24.0103 | NS1/E2 | 647 | AACNWTRGER | 85 | 36667 | 429 | 400 | 5273 | 4444 | 2 |
| 1073.16 | NS3 | 1232 | HLHAPTGSGK | 85 | 19 | 2500 | — | — | 2857 | 1 |
| 1073.12 | NS3 | 1395 | HLIFCHSKKK | 100 | 423 | — | 20000 | — | — | 1 |
| 1090.26 | NS3 | 1395 | HLIFCHSKK | 100 | 440 | 10000 | — | — | 8000 | 1 |

* A dash indicates IC50 nM > 30,000

TABLE XXVIII
HCV derived conserved B*0702 binding peptides

| | | | | | B7-supertype binding capacity (IC50 nM) | | | | | |
|---|---|---|---|---|---|---|---|---|---|---|
| Peptide | Molecule | 1st Position | Sequence | Consv. | B*0702 | B*3501 | B*51 | B*5301 | B*5401 | B7 XRN |

A. High conservancy 9- and 10-mer peptides.

| | | | | | | | | | | |
|---|---|---|---|---|---|---|---|---|---|---|
| 1145.12 | Core | 169 | LPGCSFSIF | 92 | 28 | 90 | 100 | 114 | 6667 | 4 |
| 15.0048 | E2 | 681 | LPALSTGLI | 85 | 157 | — | 2.8 | 1500 | 20000 | 2 |
| 15.0234 | NS3 | 1620 | KPTLHGPTPL | 79 | 3.9 | — | 27500 | — | — | 1 |
| 15.0247 | NS5 | 2835 | APTLWARMIL | 79 | 6.3 | — | 5500 | — | — | 1 |
| 15.0042 | CORE | 99 | SPRGSRPSW | 79 | 14 | — | 11000 | — | — | 1 |
| 15.0039 | Core | 57 | QPRGRRQPI | 92 | 24 | — | — | — | — | 1 |
| 15.0218 | Core | 37 | LPRRGPRLGV | 92 | 29 | — | 6111 | — | 4000 | 1 |
| 15.0060 | NS5 | 2615 | SPGQRVEFL | 79 | 46 | — | 27500 | — | — | 1 |
| 15.0043 | Core | 111 | DPRRRSRLNL | 85 | 324 | — | — | — | — | 1 |
| 15.0063 | NS5 | 2835 | APTLWARMI | 79 | 344 | — | 4583 | — | — | 1 |
| 1292.17 | NS5 | 2317 | PPVVHGCPL | 79 | 393 | — | — | — | — | 1 |
| 15.0239 | NS4 | 1893 | SPGALVVGVV | 79 | 423 | — | 3438 | — | — | 1 |
| 15.0235 | NS3 | 1621 | TPLLYRLGAV | 92 | 458 | — | 6875 | — | 909 | 1 |

B. Additional HCV derived B7 supermotif peptides.

| | | | | | | | | | | |
|---|---|---|---|---|---|---|---|---|---|---|
| 29.0035 | NS3 | 1378 | IPFYGKAI | 92 | 458 | — | 46 | — | 50 | 3 |
| 29.0040 | Core | 37 | LPRRGPRL | 92 | 0.85 | — | 306 | — | 5000 | 2 |
| 29.0036 | Core | 137 | IPLVGAPL | 79 | 13 | 2250 | 79 | — | 2857 | 2 |
| 16.0187 | NS1/E2 | 680 | LPCSFTTLPA | 64 | 423 | 24000 | 9167 | — | 15 | 2 |
| 29.0039 | Core | 169 | LPGCSFSI | 92 | 500 | 200 | 932 | 620 | 6250 | 2 |
| 15.0219 | Core | 142 | APLGGAARAL | 71 | 9.5 | — | — | — | 12500 | 1 |
| 29.0031 | NS5 | 2869 | APTLWARM | 79 | 13 | — | 4583 | — | 4348 | 1 |
| 15.0231 | NS3 | 1512 | RPSGMFDSSV | 71 | 153 | — | — | — | — | 1 |
| 29.0085 | NS5 | 2474 | LPINALSNSL | 57 | 220 | 18000 | 1170 | — | 11111 | 1 |
| 29.0037 | NS5 | 2608 | KPARLIVF | 85 | 367 | — | 3235 | — | 16667 | 1 |
| 15.0237 | NS4 | 1789 | NPALASLMAF | 71 | 393 | 9000 | 5000 | — | — | 1 |
| 29.0118 | NS5 | 2869 | APTLWARMILM | 79 | 423 | — | — | — | 3030 | 1 |
| 29.0042 | NS4 | 1720 | LPYIEQGM | 85 | 423 | — | 1375 | — | 7692 | 1 |

C. Engineered analogs of B7 supermotif peptides.

| | | | | | | | | | | |
|---|---|---|---|---|---|---|---|---|---|---|
| 1145.12 | Core | 169 | LPGCSFSIF | 92 | 28 | 90 | 100 | 114 | 6667 | 4 |
| 1292.24 | Core | 169 | LPGCSFSII | | 37 | 4364 | 5.3 | 262 | 1056 | 3 |
| 1145.13 | Core | 169 | FPGCSFSIF | | 19 | 1.6 | 132 | 3.2 | 6.7 | 5 |

* A dash indicates IC50 nM > 30,000.

TABLE XXIX
HCV-derived A1- and A24-motif containing peptides

| | | | | | |
|---|---|---|---|---|---|
| | | | | | HLA-A*0101 |
| Peptide | Molecule | Position | Sequence | Conserv. | binding (IC50 nM) |

A. A1-motif peptides

| | | | | | |
|---|---|---|---|---|---|
| 13.0019 | NS5 | 2922 | LSAFSLHSY | 79 | 31 |
| 1.0509 | NS5 | 2921 | GLSAFSLHSY | 79 | 61 |
| 1069.62 | NS3 | 1128 | CTCGSSDLY | 79 | 68 |
| 24.0093 | NS5 | 2129 | EVDGVRLHRY | 100 | 167 |
| 13.0016 | NS3 | 1241 | KSTKVPAAY | 85 | 1923 |
| 1.0125 | NS3 | 1525 | CYDAGCAWY | 79 | 4032 |
| 24.0008 | E1 | 206 | DCSNSSIVY | 85 | 16667 |
| 24.0094 | NS5 | 2720 | TNSKGQNCGY | 100 | — |
| 24.0096 | NS3 | 1240 | GKSTKVPAAY | 85 | — |
| 24.0100 | NS3 | 1292 | TGAPITYSTY | 85 | — |
| | NS3 | 1263 | VAATLGFGAY | 100 | |
| | NS5 | 2639 | VMGSSYGFQY | 79 | |
| | NS5 | 2640 | MGSSYGFQY | 79 | |

B. A24-motif peptides

| | | | | | |
|---|---|---|---|---|---|
| 24.0092 | NS4 | 1765 | FWAKHMWNF | 85 | 1.7 |
| 13.0075 | NS4 | 1778 | QYLAGLSTL | 100 | 250 |
| 1073.18 | NS1/E2 | 636 | MYVGGVEHRL | 92 | 444 |
| 13.0074 | NS3 | 1297 | TYSTYGKFL | 85 | 522 |
| 13.0134 | NS5 | 2647 | QYSPGQRVEF | 79 | 667 |
| 24.0091 | NS4 | 1772 | NFISGIQYL | 100 | 706 |
| 13.0131 | Core | 135 | GYIPLVGAPL | 79 | 2105 |
| 24.0108 | Core | 173 | SFSIFLLALL | 100 | 2927 |
| 13.0132 | NS3 | 1248 | AYAAQGYKVL | 79 | 13333 |
| 13.0133 | NS4 | 1859 | GYGAGVAGAL | 85 | — |
| 1174.08 | NS4 | 1769 | HMWNFISGI | 93 | |
| | E1 | 317 | RMAWDMMMNW | 85 | |
| | NS1/E2 | 635 | RMYVGGVEHRL | 93 | |
| | NS3 | 1422 | YYRGLDVSVI | 100 | |
| | NS3 | 1468 | DFSLDPTFTI | 100 | |
| | NS3 | 1608 | SWDQMWKCL | 79 | |
| | NS3 | 1664 | TWVLVGGVL | 85 | |
| | NS4 | 1732 | QFKQKALGL | 85 | |
| | NS4 | 1732 | QFKQKALGLL | 85 | |
| | NS4 | 1765 | FWAKHMWNFI | 85 | |
| | NS4 | 1919 | QWMNRLIAF | 100 | |
| | NS5 | 2241 | LWRQEMGGNI | 85 | |
| | NS5 | 2669 | GFSYDTRCF | 79 | |
| | NS5 | 2875 | RMILMTHFF | 85 | |

A dash indicates IC50 nM > 25000

TABLE XXX
Immunogenicity of A2-supertype cross-reactive binders

Immunogenicity

Human^{a}

| | | | | Barnaba; | Barnaba; | | | | Transgenic mice^{b} | |
|---|---|---|---|---|---|---|---|---|---|---|
| Peptide | Sequence | Protein | Position | patients | contacts | Chisari | Pape | overall | Frequency | Response |

| | | | | | | | | | | |
|---|---|---|---|---|---|---|---|---|---|---|
| 1073.05 | LLFNILGGWV | NS4 | 1812 | 1/6 | 7/17 | 2/21 | 0/6 | 10/50 | 6/6 | 6.4 (1.7) |
| 1090.18 | FLLLADARV | NS1/E2 | 728 | 2/6 | 7/17 | 1/21 | 0/6 | 10/50 | 5/6 | 9.5 (3.0) |
| 1013.02 | YLVAYQATV | NS4 | 1590 | 1/6 | 4/17 | 1/21 | 0/6 | 6/50 | 5/6 | 8.5 (3.7) |
| 1090.22 | RLIVFPDLGV | NS5 | 2578 | 2/6 | 5/17 | 0/21 | 0/6 | 7/50 | 0/6 | — |
| 1013.1002 | DLMGYIPLV | Core | 132 | 2/6 | 7/17 | 1/21 | 1/6 | 11/50 | 5/6 | 8.8 (2.6) |
| 24.0073 | WMNRLIAFA | NS4 | 1920 | 1/6 | 3/17 | 2/21 | 1/6 | 7/50 | 0/6 | — |
| 24.0075 | VLVGGVLAA | NS4 | 1666 | 1/6 | 6/17 | 3/21 | 1/6 | 11/50 | 0/6 | — |
| 1174.08 | HMWNFISGI | NS4 | 1769 | 3/6 | 3/17 | 2/21 | 0/6 | 8/50 | 6/6 | 6.4 (1.7) |
| 1073.06 | ILAGYGAGV | NS4 | 1851 | 2/6 | 3/17 | 0/21 | 0/6 | 5/50 | 3/6 | 54.7 (3.3) |
| 1073.07 | YLLPRRGPRL | CORE | 35 | 2/6 | 5/17 | 7/21 | 1/6 | 17/50 | 4/6 | 59.1 (7.2) |
| 24.0071 | LLFLLLADA | NS1/E2 | 726 | 2/6 | 9/17 | 0/21 | 0/6 | 11/50 | 0/6 | — |
| 1.0119 | YLVTRHADV | NS3 | 1131 | 6/6 | 10/17 | 0/21 | 1/6 | 17/50 | 0/6 | — |

^{a}Data shown represents the number of positive responses over the total number of patients or contacts examined.
^{b}Frequency represents the number of positive responses over the total number of mice examined. Response indicates the average magnitude (standard deviation) of the response in positive animals, measured in lytic units.

TABLE XXXI
Immunogenicity of A3-supertype cross-reactive binders

Immunogenicity

Human^{a}

| | | | | Barnaba | Barnaba; | | | | Transgenic mice^{b} | |
|---|---|---|---|---|---|---|---|---|---|---|
| Peptide | Sequence | Protein | Position | patients | contacts | Chisari | Pape | overall | Frequency | Response |

| | | | | | | | | | | |
|---|---|---|---|---|---|---|---|---|---|---|
| 1.0952 | KTSERSQPR | CORE | 51 | 2/16 | 1/4 | 3/12 | 0/6 | 6/38 | 3/6 | 23.4 (1.3) |
| 1073.11 | RLGVRATRK | CORE | 43 | 4/16 | 1/4 | 7/12 | 1/6 | 13/38 | 3/6 | 42.2 (1.2) |
| 1.0955 | QLFTFSPRR | ENV | 290 | 1/16 | 0/4 | 6/12 | 1/6 | 8/38 | | |
| 1073.13 | RMYVGGVEHR | NS1/E2 | 632 | 5/16 | 1/4 | 4/12 | 1/6 | 11/38 | 2/6 | 2.8 (1.1) |
| 1.0123 | LIFCHSKKK | NS3 | 1396 | 6/16 | 1/4 | 4/12 | 2/6 | 13/38 | 3/6 | 4.4 (1.1) |
| 1073.10 | GVAGALVAFK | NS4 | 1863 | 3/16 | 0/4 | 6/12 | 2/6 | 11/38 | 6/6 | 56.5 (1.7) |
| 24.0090 | VAGALVAFK | NS4 | 1864 | 4/16 | 1/4 | 6/12 | 0/4 | 11/38 | 1/6 | 7.1 |
| 24.0086 | TLGFGAYMSK | NS3 | 1262 | 6/16 | | 2/12 | 2/5 | 10/33 | | |

^{a}Data shown represents the number of positive responses over the total number of patients or contacts examined.
^{b}Frequency represents the number of positive responses over the total number of mice examined. Response indicates the average magnitude (standard deviation) of the response in positive animals, measured in lytic units.

TABLE XXXII
Candidate HCV-derived HTL epitopes

| Selection | | | | Conservancy | |
|---|---|---|---|---|---|
| criteria | Peptide | Sequence | Source | Total | Core |

| | | | | | |
|---|---|---|---|---|---|
| A.DR-supermotif | 1283.01 | GQIVGGVYLLPRRGPR | HCV Core 28 | 93 | 93 |
| conserved 15mers | 1283.02 | VYLLPRRGPRLGVRA | HCV Core 34 | 93 | 93 |
| | 1283.03 | GWLLSPRGSRPSWGPT | HCV Core 95 | 79 | 79 |
| | 1283.04 | LGKVIDTLTCGFADL | HCV Core 119 | 79 | 86 |
| | 1283.05 | IDTLTCGFADLMGYI | HCV Core 123 | 86 | 86 |
| | 1283.06 | ADLMGYIFLVGAPLG | HCV Core 131 | 79 | 79 |
| | 1283.07 | GVRVLEDGVNYATGN | HCV Core 154 | 86 | 86 |
| | 1283.08 | GVNYATGNLPGCSFS | HCV Core 161 | 79 | 86 |
| | 1283.09 | GCSFSIFLLALLSCL | HCV Core 171 | 86 | 100 |
| | 1283.10 | GHRMAWDMMMNWSPT | HCV E1 315 | 86 | 86 |
| | 1283.11 | CGPVYCFTPSPVVVG | HCV NS1/E2 506 | 93 | 93 |
| | 1283.12 | VYCFTPSPVVVGTTD | HCV NS1/E2 509 | 93 | 93 |
| | 1283.13 | GNWFGCTWMNSTGFT | HCV NS1/E2 550 | 79 | 86 |
| | 1283.14 | FTTLPALSTGLIHLH | HCV NS1/E2 684 | 79 | 86 |
| | 1283.17 | DLYLVTRHADVIPVR | HCV NS3 1134 | 79 | 79 |
| | 1283.18 | RAAVCTRGVAKAVDF | HCV NS3 1186 | 79 | 79 |
| | 1283.20 | AQGYKVLVLNPSVAA | HCV NS3 1251 | 79 | 100 |
| | 1283.21 | GYKVLVLNPSVAATL | HCV NS3 1253 | 100 | 100 |
| | 1283.22 | VLVLNPSVAATLGFG | HCV NS3 1256 | 100 | 100 |
| | 1283.23 | GTVLDQAETAGARLV | HCV NS3 1335 | 86 | 86 |
| | 1283.24 | GARLVVLATATPPGS | HCV NS3 1345 | 79 | 86 |
| | 1283.25 | GRHLIFCHSKKKCDE | HCV NS3 1393 | 100 | 100 |
| | 1283.27 | DSVIDCNTCVTQTVD | HCV NS3 1454 | 86 | 86 |
| | 1283.28 | TVDFSLDPTFTIETT | HCV NS3 1466 | 79 | 100 |
| | 1283.30 | FTGLTHIDAHFLSQT | HCV NS3 1567 | 93 | 93 |
| | 1283.31 | YLVAYQATVCARAQA | HCV NS3 1591 | 79 | 93 |
| | 1283.32 | KPTLHGPTPLLYRLG | HCV NS4 1620 | 79 | 79 |
| | 1283.33 | LEVVTSTWVLVGGVL | HCV NS4 1658 | 86 | 86 |
| | 1283.34 | TWVLVGGVLAALAAY | HCV NS4 1664 | 86 | 86 |
| | 1283.35 | AEQFKQKALGLLQTA | HCV NS4 1730 | 86 | 86 |
| | 1283.40 | PAILSPGALVVGVVCA | HCV NS4 1889 | 79 | 93 |
| | 1283.41 | GALVVGVVCAAILRR | HCV NS4 1895 | 79 | 79 |
| | 1283.42 | CAAILRRHVGPGEGA | HCV NS4 1903 | 79 | 79 |
| | 1283.43 | AVQWMNRLIAFASRG | HCV NS4 1917 | 100 | 100 |
| | 1283.44 | MNRLIAFASRGNHVS | HCV NS4 1921 | 86 | 100 |
| | 1283.48 | ANLLWRQEMGGNITR | HCV NS5 2238 | 86 | 86 |
| | 1283.49 | RQEMGGNITRVESEN | HCV NS5 2243 | 86 | 86 |
| | 1283.52 | ARLIVFPDLGVRVCE | HCV NS5 2610 | 79 | 79 |
| | 1283.53 | FPDLGVRVCEKMALY | HCV NS5 2615 | 79 | 100 |
| | 1283.54 | GVRVCEKMALYDVVS | HCV NS5 2619 | 79 | 100 |
| | 1283.56 | QPEYDLELITSCSSN | HCV NS5 2808 | 79 | 93 |
| | 1283.57 | LELITSCSSNVSVAH | HCV NS5 2813 | 79 | 100 |
| | 1283.58 | PTLWARMILMTHFFS | HCV NS5 2870 | 79 | 86 |
| | 1283.59 | LHGLSAFSLHSYSPG | HCV NS5 2919 | 79 | 79 |
| | 1283.60 | AFSLHSYSPGEINRV | HCV NS5 2924 | 79 | 79 |
| B. High algorithm | 1283.15 | VVLLFLLLADARVCS | HCV NS1/E2 724 | 29 | 100 |
| conserved core | 1283.16 | SKGWRLLAPITAYAQ | HCV NS3 1025 | 29 | 79 |
| | 1283.19 | PQTFQVAHLHAPTGS | HCV NS3 1225 | 43 | 85 |
| | 1283.26 | DVVVVATDAIMTGYT | HCV NS3 1436 | 43 | 79 |
| | 1283.29 | WESVFTGLTHIDAHF | HCV NS3 1563 | 43 | 92 |
| | 1283.45 | LTSMLTDPSHITAET | HCV NS5 2176 | 57 | 100 |
| | 1283.46 | ASQLSAPSLKATCTT | HCV NS5 2208 | 50 | 79 |
| | 1283.47 | DADLIEANLLWRQEM | HCV NS5 2232 | 50 | 85 |
| | 1283.50 | SYTWTGALITPCAAE | HCV NS5 2456 | 64 | 79 |
| | 1283.51 | TTIMAKNEVFCVQPE | HCV NS5 2589 | 64 | 85 |
| | 1283.55 | GSSYGFQYSPGQRVE | HCV NS5 2641 | 71 | 79 |
| | 1283.61 | ASCLRKLGVPPLRVW | HCV NS5 2939 | 50 | 85 |
| C. Collaborator | F098.03 | AAYAAQGYKVLVLNPSVAAT | HCV NS3 1242-1261 | 71 | 100 |
| | F098.04 | GYKVLVLNPSVAATLGFGAY | HCV NS3 1248-1267 | 100 | |
| | F098.05 | GYKVLVLNPSVAAT | HCV NS3 1248-1261 | 100 | |
| | F134.01 | RRPQDVKFPGGGQIVGGVY | HCV Core 17-35 | 86 | |
| | F134.02 | DVKFPGGGQIVGGVYLLPRR | HCV Core 21-40 | 86 | |
| | F134.03 | GYKVLVLNPSVAATLGFGAY | HCV NS3 1253-1272 | 100 | |
| | F134.04 | TLHGPTPLLYRLGAVQNEIT | HCV NS4 1622-1641 | | 79 |
| | F134.05 | NFISGIQYLAGLSTLPGNPA | HCV NS4 1772-1791 | 100 | |
| | F134.06 | LLFNILGGWVAAQLAAPGAA | HCV NS4 1812-1831 | | 86 |
| | F134.07 | GPGEGAVQWMNRLIAFASRG | HCV NS4 1912-1931 | 86 | 100 |
| | F134.08 | GEGAVQWMNRLIAFASRGNHV | HCV NS4 1914-1934 | 100 | |
| | Pape 21 | AIPLEVIKGGRHLIFCHSKR | HCV NS3 1379-1398 | 21 | 100 |
| | Pape 22 | GRHLIFCHSKRKCDELATKL | HCV NS3 1388-1407 | | 100 |
| | Pape 29 | SVIDCNTCVTQTVDFSLDPT | HCV NS3 1450-1469 | 86 | |
| D. DR3 motif | 35.0102 | GVRVLEDGVNYATGN | HCV 154 | 86 | 86 |
| | 35.0103 | SAMYVGDLCGSVFLV | HCV 273 | 57 | 86 |
| | 35.0104 | GHRMAWDMMMNWSPT | HCV 315 | 86 | 86 |
| | 35.0105 | SDLYLVTRHADVIPV | HCV 1133 | 79 | 86 |
| | 35.0106 | VVVVATDALMTGYTG | HCV 1437 | 42 | 86 |
| | 35.0107 | TVDFSLDPTFTIETT | HCV 1466 | 79 | 100 |
| | 35.0108 | DSSVLCECYDAGCAW | HCV 1518 | 71 | 93 |
| | 35.0109 | GLPVCQDHLEFWESV | HCV 1552 | 42 | 86 |
| | 35.0110 | GMQLAEQFKQKALGL | HCV 1726 | 57 | 86 |
| | 35.0111 | PTHYVPESDAAARVT | HCV 1936 | 86 | 86 |
| | 35.0112 | GSQLPCEPEPDVAVL | HCV 2162 | 64 | 86 |
| | 35.0113 | LTSMLTDPSHITAET | HCV 2176 | 57 | 100 |
| | 35.0114 | MPPLEGEPGDPDLSD | HCV 2401 | 79 | 100 |
| | 35.0115 | QPEYDLELITSCSSN | HCV 2808 | 79 | 93 |
| | 1283.25 | GRHLIFCHSKKKCDE | HCV NS3 1393-1407 | | |

TABLE XXXIII
HLA-DR screening panels

| Screening | | | Representative Assay | | Phenotypic Frequencies | | | | | |
|---|---|---|---|---|---|---|---|---|---|---|
| Panel | Antigen | Alleles | Allele | Alias | Cauc. | Blk. | Jpn. | Chn. | Hisp. | Avg. |
| Primary | DR1 | DRB1*0101-03 | DRB1*0101 | (DR1) | 18.5 | 8.4 | 10.7 | 4.5 | 10.1 | 10.4 |
| | DR4 | DRB1*0401-12 | DRB1*0401 | (DR4w4) | 23.6 | 6.1 | 40.4 | 21.9 | 29.8 | 24.4 |
| | DR7 | DRB1*0701-02 | DRB1*0701 | (DR7) | 26.2 | 11.1 | 1.0 | 15.0 | 16.6 | 14.0 |
| | Panel total | | | | 59.6 | 24.5 | 49.3 | 38.7 | 51.1 | 44.6 |
| Secondary | DR2 | DRB1*1501-03 | DRB1*1501 | (DR2w2 β1) | 19.9 | 14.8 | 30.9 | 22.0 | 15.0 | 20.5 |
| | DR2 | DRB5*0101 | DRB5*0101 | (DR2w2 β2) | — | — | — | — | — | — |
| | DR9 | DRB1*09011, 09012 | DRB1*0901 | (DR9) | 3.6 | 4.7 | 24.5 | 19.9 | 6.7 | 11.9 |
| | DR13 | DRB1*1301-06 | DRB1*1302 | (DR6w19) | 21.7 | 16.5 | 14.6 | 12.2 | 10.5 | 15.1 |
| | Panel total | | | | 42.0 | 33.9 | 61.0 | 48.9 | 30.5 | 43.2 |
| Tertiary | DR4 | DRB1*0405 | DRB1*0405 | (DR4w15) | — | — | — | — | — | — |
| | DR8 | DRB1*0801-5 | DRB1*0802 | (DR8w2) | 5.5 | 10.9 | 25.0 | 10.7 | 23.3 | 15.1 |
| | DR11 | DRB1*1101-05 | DRB1*1101 | (DR5w11) | 17.0 | 18.0 | 4.9 | 19.4 | 18.1 | 15.5 |
| | Panel total | | | | 22.0 | 27.8 | 29.2 | 29.0 | 39.0 | 29.4 |
| Quarternary | DR3 | DRB1*0301-2 | DRB1*0301 | (DR3w17) | 17.7 | 19.5 | 0.4 | 7.3 | 14.4 | 11.9 |
| | DR12 | DRB1*1201-02 | DRB1*1201 | (DR5w12) | 2.8 | 5.5 | 13.1 | 17.6 | 5.7 | 8.9 |
| | Panel total | | | | 20.2 | 24.4 | 13.5 | 24.2 | 19.7 | 20.4 |

TABLE XXXIV
HLA-DR binding capacity of target derived peptides: DR-supermotif and
algorithm positive peptides.

[chemical structure]

[chemical structure]

Shading indicates IC50 > 1 μM.
A dash (-) indicates IC50 > 20 μM.

TABLE XXXV

HLA-DR binding capacity of 3 DR3 motif-
containing peptides

| | | | |
|---|---|---|---|
| | | | DR3 binding |
| Peptide | Sequence | Source | (IC50 nM) |

| | | | |
|---|---|---|---|
| 35.0106 | VVVVATDALMTGYTG | HCV 1437 | 427 |
| 35.0107 | TVDFSLDPTFTIETT | HCV 1466 | 235 |
| 1283.25 | GRHLIFCHSKKKCDE | HCV NS3 1393 | ND |

TABLE XXXVIa
HCV-derived CTL epitope candidates

| | | | | | |
|---|---|---|---|---|---|
| | | 1st | | | Selection |
| Peptide | Molecule | Position | Sequence | Consv. | criteria |

| | | | | | |
|---|---|---|---|---|---|
| 1073.05 | NS4 | 1812 | LLFNILGGWV | 85 | A2-supertype |
| 1090.18 | NS1/E2 | 728 | FLLLADARV | 92 | A2-supertype |
| 1013.02 | NS4 | 1590 | YLVAYQATV | 85 | A2-supertype |
| 1090.22 | NS5 | 2611 | RLIVFPDLGV | 79 | A2-supertype |
| 1013.1002 | CORE | 132 | DLMGYIPLV | 79 | A2-supertype |
| 24.0073 | NS4 | 1920 | WMNRLIAFA | 100 | A2-supertype |
| 24.0075 | NS4 | 1666 | VLVGGVLAA | 85 | A2-supertype |
| 1174.08 | NS4 | 1769 | HMWNFISGI | 92 | A2-supertype |
| 1073.06 | NS4 | 1851 | ILAGYGAGV | 79 | A2-supertype |
| 1073.07 | CORE | 35 | YLLPRRGPRL | 92 | A2-supertype |
| 24.0071 | NS1/E2 | 726 | LLFLLLADA | 100 | A2-supertype |
| 1.0119 | LORF | 1131 | YLVTRHADV | 85 | A2-supertype |
| 1.0952 | CORE | 51 | KTSERSQPR | 92 | A3-supertype |
| 1073.11 | CORE | 43 | RLGVRATRK | 79 | A3-supertype |
| 1.0955 | ENV1 | 290 | QLFTFSPRR | 79 | A3-supertype |
| 1073.13 | NS1/E2 | 632 | RMYVGGVEHR | 100 | A3-supertype |
| 1.0123 | NS3 | 1396 | LIFCHSKKK | 100 | A3-supertype |
| 1073.10 | NS4 | 1863 | GVAGALVAFK | 85 | A3-supertype |
| 24.0090 | NS4 | 1864 | VAGALVAFK | 85 | A3-supertype |
| 24.0086 | NS3 | 1262 | TLGFGAYMSK | 85 | A3-supertype |
| F104.01 | NS5 | 3003 | VGIYLLPNR | 79 | A31 |
| 1145.12 | Core | 169 | LPGCSFSTF | 92 | B7-supertype |
| 29.0035 | NS3 | 1378 | IPFYGKAI | 92 | B7-supertype |
| 13.0019 | NS5 | 2922 | LSAFSLHSY | 79 | A1 |
| 1069.62 | NS3 | 1128 | CTCGSSDLY | 79 | A1 |
| 24.0092 | NS4 | 1765 | FWAKHMWNF | 85 | A24 |

TABLE XXXVIb
HCV-derived HTL epitope candidates

| | | | |
|---|---|---|---|
| Region | Peptide | Motif¹ | Sequence |

| | | | |
|---|---|---|---|
| HCV NS3 | 1283.16 | DR | SKGWRLLAPITAYAQ |
| 1025-1039 | | | |
| HCV NS3 | F98.03 | DR | AAYAAQGYKVLVLNPSVAAT |
| 1242-1267 | | | |
| HCV NS3 | 1283.25 | DR3 | GRHLIFCHSKKKCDE |
| 1393-1407 | | | |
| HCV NS3 | 35.0106 | DR3 | VVVVATDALMTGYTG |
| 1437-1451 | | | |
| HCV NS3 | 35.0107 | DR3 | TVDFSLDPTFTIETT |
| 1466-1480 | | | |
| HCV NS4 | F134.05 | DR | NFISGIQYLAGLSTLPGNPA |
| 1772-1790 | | | |
| HCV NS4 | F134.08 | DR | GEGAVQWMNRLIAFASRGNHV |
| 1914-1935 | | | |
| HCV NS5 | 1283.55 | DR | GSSYGFQYSPGQRVE |
| 2641-2655 | | | |
| HCV NS5 | 1283.61 | DR | ASCLRKLGVPPLRVW |
| 2939-2953 | | | |

¹Peptides identified on the basis of either the DR P1-P6 supermotif or by use of the DR 1-4-7 algorithms are indicated by ‘DR’. Peptides identified using the DR3 motif are indicated by ‘DR3’.

TABLE XXXVII
Estimated population coverage by a panel of HCV derived HTL epitopes

| | | | | Population coverage | | | | | |
|---|---|---|---|---|---|---|---|---|---|
| | | Representative | No. of | (phenotypic frequency) | | | | | |
| Antigen | Alleles | assay | epitopes² | Cauc. | Blk. | Jpn. | Chn. | Hisp. | Avg. |
| DR1 | DRB1*0101-03 | DR1 | 6 | 18.5 | 8.4 | 10.7 | 4.5 | 10.1 | 10.4 |
| DR2 | DRB1*1501-03 | DR2w2 β1 | 3 | 19.9 | 14.8 | 30.9 | 22.0 | 15.0 | 20.5 |
| DR2 | DRB5*0101 | DR2w2 β2 | 6 | — | — | — | — | — | — |
| DR3 | DRB1*0301-2 | DR3 | 2 | 17.7 | 19.5 | 0.40 | 7.3 | 14.4 | 11.9 |
| DR4 | DRB1*0401-12 | DR4w4 | 5 | 23.6 | 6.1 | 40.4 | 21.9 | 29.8 | 24.4 |
| DR4 | DRB1*0401-12 | DR4w15 | 3 | — | — | — | — | — | — |
| DR7 | DRB1*0701-02 | DR7 | 5 | 26.2 | 11.1 | 1.0 | 15.0 | 16.6 | 14.0 |
| DR8 | DRB1*0801-5 | DR8w2 | 5 | 5.5 | 10.9 | 25.0 | 10.7 | 23.3 | 15.1 |
| DR9 | DRB1*09011, 09012 | DR9 | 3 | 3.6 | 4.7 | 24.5 | 19.9 | 6.7 | 11.9 |
| DR11 | DRB1*1101-05 | DR5w11 | 5 | 17.0 | 18.0 | 4.9 | 19.4 | 18.1 | 15.5 |
| DR13 | DRB1*1301-06 | DR6w19 | 2 | 21.7 | 16.5 | 14.6 | 12.2 | 10.5 | 15.1 |
| Total¹ | | | | 98.5 | 95.1 | 97.1 | 91.3 | 94.3 | 95.1 |

¹Total population coverage has been adjusted to acount for the presence of DRX in many ethnic populations. It has been assumed that the range of specificities represented by DRX alleles will mirror those of previously characterized HLA-DR alleles. The proportion of DRX incorporated under each motif is representative of the frequency of the motif in the remainder of the population. Total coverage has not been adjusted to account for unknown gene types.
²Number of epitopes represents a minimal estimate, considering only the epitopes shown in Table 6. Additional alleles possibly bound by nested epitopes have not been accounted.

The application's sequence listing, which the Patent Office published only in electronic form, follows.

SEQUENCE LISTING (3683 sequences)

SEQ ID NO: 1 - protein, 10 aa, Hepatitis C Virus
ATGNLPGCSF

SEQ ID NO: 2 - protein, 8 aa, Hepatitis C Virus
ATLGFGAY

SEQ ID NO: 3 - protein, 11 aa, Hepatitis C Virus
AVQWMNRLIAF

SEQ ID NO: 4 - protein, 9 aa, Hepatitis C Virus
CTCGSSDLY

SEQ ID NO: 5 - protein, 11 aa, Hepatitis C Virus
CTRGVAKAVDF

SEQ ID NO: 6 - protein, 9 aa, Hepatitis C Virus
CTWMNSTGF

SEQ ID NO: 7 - protein, 8 aa, Hepatitis C Virus
CVTQTVDF

SEQ ID NO: 8 - protein, 9 aa, Hepatitis C Virus
DLEVVTSTW

SEQ ID NO: 9 - protein, 9 aa, Hepatitis C Virus
ETTMRSPVF

SEQ ID NO: 10 - protein, 8 aa, Hepatitis C Virus
FSYDTRCF

SEQ ID NO: 11 - protein, 8 aa, Hepatitis C Virus
FTEAMTRY

SEQ ID NO: 12 - protein, 11 aa, Hepatitis C Virus
FTGLTHIDAHF

SEQ ID NO: 13 - protein, 11 aa, Hepatitis C Virus
GLPVCQDHLEF

SEQ ID NO: 14 - protein, 10 aa, Hepatitis C Virus
GLSAFSLHSY

SEQ ID NO: 15 - protein, 9 aa, Hepatitis C Virus
GLTHIDAHF

SEQ ID NO: 16 - protein, 8 aa, Hepatitis C Virus
GSSYGFQY

SEQ ID NO: 17 - protein, 8 aa, Hepatitis C Virus
GTFPINAY

SEQ ID NO: 18 - protein, 9 aa, Hepatitis C Virus
GVAGALVAF

SEQ ID NO: 19 - protein, 8 aa, Hepatitis C Virus
GVAKAVDF

SEQ ID NO: 20 - protein, 9 aa, Hepatitis C Virus
GVLAALAAY

SEQ ID NO: 21 - protein, 11 aa, Hepatitis C Virus
GVRVCEKMALY

SEQ ID NO: 22 - protein, 11 aa, Hepatitis C Virus
GVRVLEDGVNY

SEQ ID NO: 23 - protein, 11 aa, Hepatitis C Virus
HLHQNIVDVQY

SEQ ID NO: 24 - protein, 11 aa, Hepatitis C Virus
HMWNFISGIQY

SEQ ID NO: 25 - protein, 11 aa, Hepatitis C Virus
HVGPGEGAVQW

SEQ ID NO: 26 - protein, 8 aa, Hepatitis C Virus
IMAKNEVF

SEQ ID NO: 27 - protein, 9 aa, Hepatitis C Virus
ITYSTYGKF

SEQ ID NO: 28 - protein, 8 aa, Hepatitis C Virus
IVDVQYLY

SEQ ID NO: 29 - protein, 9 aa, Hepatitis C Virus
KSTKVPAAY

SEQ ID NO: 30 - protein, 10 aa, Hepatitis C Virus
KVIDTLTCGF

SEQ ID NO: 31 - protein, 8 aa, Hepatitis C Virus
LIEANLLW

SEQ ID NO: 32 - protein, 8 aa, Hepatitis C Virus
LINTNGSW

SEQ ID NO: 33 - protein, 8 aa, Hepatitis C Virus
LLAPITAY

SEQ ID NO: 34 - protein, 9 aa, Hepatitis C Virus
LLFNILGGW

SEQ ID NO: 35 - protein, 11 aa, Hepatitis C Virus
LLSPRGSRPSW

SEQ ID NO: 36 - protein, 9 aa, Hepatitis C Virus
LSAFSLHSY

SEQ ID NO: 37 - protein, 10 aa, Hepatitis C Virus
LSPRGSRPSW

SEQ ID NO: 38 - protein, 11 aa, Hepatitis C Virus
LTCGFADLMGY

SEQ ID NO: 39 - protein, 8 aa, Hepatitis C Virus
LTHIDAHF

SEQ ID NO: 40 - protein, 8 aa, Hepatitis C Virus
LVDILAGY

SEQ ID NO: 41 - protein, 8 aa, Hepatitis C Virus
MILMTHFF

SEQ ID NO: 42 - protein, 9 aa, Hepatitis C Virus
NIVDVQYLY

SEQ ID NO: 43 - protein, 10 aa, Hepatitis C Virus
NLPGCSFSIF

SEQ ID NO: 44 - protein, 10 aa, Hepatitis C Virus
NTCVTQTVDF

SEQ ID NO: 45 - protein, 11 aa, Hepatitis C Virus
NTNRRPQDVKF

SEQ ID NO: 46 - protein, 9 aa, Hepatitis C Virus
NVDQDLVGW

SEQ ID NO: 47 - protein, 10 aa, Hepatitis C Virus
PITYSTYGKF

SEQ ID NO: 48 - protein, 11 aa, Hepatitis C Virus
PMGFSYDTRCF

SEQ ID NO: 49 - protein, 9 aa, Hepatitis C Virus
PSVAATLGF

SEQ ID NO: 50 - protein, 11 aa, Hepatitis C Virus
PTLHGPTPLLY

SEQ ID NO: 51 - protein, 9 aa, Hepatitis C Virus
PVCQDHLEF

SEQ ID NO: 52 - protein, 10 aa, Hepatitis C Virus
PVCQDHLEFW

SEQ ID NO: 53 - protein, 11 aa, Hepatitis C Virus
QTVDFSLDPTF

SEQ ID NO: 54 - protein, 8 aa, Hepatitis C Virus
RLHGLSAF

SEQ ID NO: 55 - protein, 9 aa, Hepatitis C Virus
RLLAPITAY

SEQ ID NO: 56 - protein, 10 aa, Hepatitis C Virus
RMAWDMMMNW

SEQ ID NO: 57 - protein, 8 aa, Hepatitis C Virus
RMILMTHF

SEQ ID NO: 58 - protein, 9 aa, Hepatitis C Virus
RMILMTHFF

SEQ ID NO: 59 - protein, 9 aa, Hepatitis C Virus
RVCEKMALY

SEQ ID NO: 60 - protein, 9 aa, Hepatitis C Virus
RVLEDGVNY

SEQ ID NO: 61 - protein, 8 aa, Hepatitis C Virus
STKVPAAY

SEQ ID NO: 62 - protein, 8 aa, Hepatitis C Virus
SVAATLGF

SEQ ID NO: 63 - protein, 11 aa, Hepatitis C Virus
SVAATLGFGAY

SEQ ID NO: 64 - protein, 9 aa, Hepatitis C Virus
TIMAKNEVF

SEQ ID NO: 65 - protein, 10 aa, Hepatitis C Virus
TLHGPTPLLY

SEQ ID NO: 66 - protein, 10 aa, Hepatitis C Virus
TLLFNILGGW

SEQ ID NO: 67 - protein, 10 aa, Hepatitis C Virus
TTIMAKNEVF

SEQ ID NO: 68 - protein, 8 aa, Hepatitis C Virus
TTMRSPVF

SEQ ID NO: 69 - protein, 10 aa, Hepatitis C Virus
TVDFSLDPTF

SEQ ID NO: 70 - protein, 9 aa, Hepatitis C Virus
VIDTLTCGF

SEQ ID NO: 71 - protein, 8 aa, Hepatitis C Virus
VLAALAAY

SEQ ID NO: 72 - protein, 8 aa, Hepatitis C Virus
VLEDGVNY

SEQ ID NO: 73 - protein, 9 aa, Hepatitis C Virus
VLVDILAGY

SEQ ID NO: 74 - protein, 8 aa, Hepatitis C Virus
VMGSSYGF

SEQ ID NO: 75 - protein, 10 aa, Hepatitis C Virus
VMGSSYGFQY

SEQ ID NO: 76 - protein, 8 aa, Hepatitis C Virus
WMNRLIAF

SEQ ID NO: 77 - protein, 9 aa, Hepatitis C Virus
YSPGQRVEF

SEQ ID NO: 78 - protein, 11 aa, Hepatitis C Virus
YTNVDQDLVGW

SEQ ID NO: 79 - protein, 10 aa, Hepatitis C Virus
YVGDLCGSVF

SEQ ID NO: 80 - protein, 8 aa, Hepatitis C Virus
AAILRRHV

SEQ ID NO: 81 - protein, 8 aa, Hepatitis C Virus
AALAAYCL

SEQ ID NO: 82 - protein, 8 aa, Hepatitis C Virus
AAQGYKVL

SEQ ID NO: 83 - protein, 9 aa, Hepatitis C Virus
AAQGYKVLV

SEQ ID NO: 84 - protein, 10 aa, Hepatitis C Virus
AAQGYKVLVL

SEQ ID NO: 85 - protein, 9 aa, Hepatitis C Virus
AARALAHGV

SEQ ID NO: 86 - protein, 11 aa, Hepatitis C Virus
AARALAHGVRV

SEQ ID NO: 87 - protein, 8 aa, Hepatitis C Virus
AATLGFGA

SEQ ID NO: 88 - protein, 10 aa, Hepatitis C Virus
AATLGFGAYM

SEQ ID NO: 89 - protein, 8 aa, Hepatitis C Virus
AAVCTRGV

SEQ ID NO: 90 - protein, 9 aa, Hepatitis C Virus
AAVCTRGVA

SEQ ID NO: 91 - protein, 11 aa, Hepatitis C Virus
AAVCTRGVAKA

SEQ ID NO: 92 - protein, 8 aa, Hepatitis C Virus
AILSPGAL

SEQ ID NO: 93 - protein, 9 aa, Hepatitis C Virus
AILSPGALV

SEQ ID NO: 94 - protein, 10 aa, Hepatitis C Virus
AILSPGALVV

SEQ ID NO: 95 - protein, 8 aa, Hepatitis C Virus
ALAHGVRV

SEQ ID NO: 96 - protein, 9 aa, Hepatitis C Virus
ALAHGVRVL

SEQ ID NO: 97 - protein, 8 aa, Hepatitis C Virus
ALGLLQTA

SEQ ID NO: 98 - protein, 9 aa, Hepatitis C Virus
ALSTGLIHL

SEQ ID NO: 99 - protein, 9 aa, Hepatitis C Virus
ALVVGVVCA

SEQ ID NO: 100 - protein, 10 aa, Hepatitis C Virus
ALVVGVVCAA

SEQ ID NO: 101 - protein, 11 aa, Hepatitis C Virus
ALVVGVVCAAI

SEQ ID NO: 102 - protein, 11 aa, Hepatitis C Virus
AQAPPPSWDQM

SEQ ID NO: 103 - protein, 8 aa, Hepatitis C Virus
AQGYKVLV

SEQ ID NO: 104 - protein, 9 aa, Hepatitis C Virus
AQGYKVLVL

SEQ ID NO: 105 - protein, 9 aa, Hepatitis C Virus
AQPGYPWPL

SEQ ID NO: 106 - protein, 9 aa, Hepatitis C Virus
ATLGFGAYM

SEQ ID NO: 107 - protein, 8 aa, Hepatitis C Virus
ATPPGSVT

SEQ ID NO: 108 - protein, 9 aa, Hepatitis C Virus
ATVCARAQA

SEQ ID NO: 109 - protein, 8 aa, Hepatitis C Virus
AVAYYRGL

SEQ ID NO: 110 - protein, 10 aa, Hepatitis C Virus
AVAYYRGLDV

SEQ ID NO: 111 - protein, 8 aa, Hepatitis C Virus
AVCTRGVA

SEQ ID NO: 112 - protein, 10 aa, Hepatitis C Virus
AVCTRGVAKA

SEQ ID NO: 113 - protein, 11 aa, Hepatitis C Virus
AVCTRGVAKAV

SEQ ID NO: 114 - protein, 8 aa, Hepatitis C Virus
AVQWMNRL

SEQ ID NO: 115 - protein, 9 aa, Hepatitis C Virus
AVQWMNRLI

SEQ ID NO: 116 - protein, 10 aa, Hepatitis C Virus
AVQWMNRLIA

SEQ ID NO: 117 - protein, 9 aa, Hepatitis C Virus
CAAILRRHV

SEQ ID NO: 118 - protein, 9 aa, Hepatitis C Virus
CAWYELTPA

SEQ ID NO: 119 - protein, 10 aa, Hepatitis C Virus
CLRKLGVPPL

SEQ ID NO: 120 - protein, 8 aa, Hepatitis C Virus
CLWMMLLI

SEQ ID NO: 121 - protein, 8 aa, Hepatitis C Virus
CMSADLEV

SEQ ID NO: 122 - protein, 9 aa, Hepatitis C Virus
CMSADLEVV

SEQ ID NO: 123 - protein, 10 aa, Hepatitis C Virus
CMSADLEVVT

SEQ ID NO: 124 - protein, 8 aa, Hepatitis C Virus
CTCGSSDL

SEQ ID NO: 125 - protein, 10 aa, Hepatitis C Virus
CTCGSSDLYL

SEQ ID NO: 126 - protein, 11 aa, Hepatitis C Virus
CTCGSSDLYLV

SEQ ID NO: 127 - protein, 8 aa, Hepatitis C Virus
CTRGVAKA

SEQ ID NO: 128 - protein, 9 aa, Hepatitis C Virus
CTRGVAKAV

SEQ ID NO: 129 - protein, 10 aa, Hepatitis C Virus
CTWMNSTGFT

SEQ ID NO: 130 - protein, 10 aa, Hepatitis C Virus
CVTQTVDFSL

SEQ ID NO: 131 - protein, 9 aa, Hepatitis C Virus
DAGCAWYEL

SEQ ID NO: 132 - protein, 8 aa, Hepatitis C Virus
DAHFLSQT

SEQ ID NO: 133 - protein, 8 aa, Hepatitis C Virus
DILAGYGA

SEQ ID NO: 134 - protein, 10 aa, Hepatitis C Virus
DILAGYGAGV

SEQ ID NO: 135 - protein, 11 aa, Hepatitis C Virus
DILAGYGAGVA

SEQ ID NO: 136 - protein, 8 aa, Hepatitis C Virus
DLCGSVFL

SEQ ID NO: 137 - protein, 9 aa, Hepatitis C Virus
DLCGSVFLV

SEQ ID NO: 138 - protein, 8 aa, Hepatitis C Virus
DLEVVTST

SEQ ID NO: 139 - protein, 10 aa, Hepatitis C Virus
DLEVVTSTWV

SEQ ID NO: 140 - protein, 11 aa, Hepatitis C Virus
DLEVVTSTWVL

SEQ ID NO: 141 - protein, 10 aa, Hepatitis C Virus
DLGVRVCEKM

SEQ ID NO: 142 - protein, 11 aa, Hepatitis C Virus
DLGVRVCEKMA

SEQ ID NO: 143 - protein, 8 aa, Hepatitis C Virus
DLMGYIPL

SEQ ID NO: 144 - protein, 9 aa, Hepatitis C Virus
DLMGYIPLV

SEQ ID NO: 145 - protein, 11 aa, Hepatitis C Virus
DLMGYIPLVGA

SEQ ID NO: 146 - protein, 9 aa, Hepatitis C Virus
DLSDGSWST

SEQ ID NO: 147 - protein, 10 aa, Hepatitis C Virus
DLSDGSWSTV

SEQ ID NO: 148 - protein, 8 aa, Hepatitis C Virus
DLVNLLPA

SEQ ID NO: 149 - protein, 9 aa, Hepatitis C Virus
DLVNLLPAI

SEQ ID NO: 150 - protein, 10 aa, Hepatitis C Virus
DLVNLLPAIL

SEQ ID NO: 151 - protein, 9 aa, Hepatitis C Virus
DLVVICESA

SEQ ID NO: 152 - protein, 9 aa, Hepatitis C Virus
DLYLVTRHA

SEQ ID NO: 153 - protein, 11 aa, Hepatitis C Virus
DLYLVTRHADV

SEQ ID NO: 154 - protein, 9 aa, Hepatitis C Virus
DMMMNWSPT

SEQ ID NO: 155 - protein, 8 aa, Hepatitis C Virus
DQAETAGA

SEQ ID NO: 156 - protein, 10 aa, Hepatitis C Virus
DQAETAGARL

SEQ ID NO: 157 - protein, 11 aa, Hepatitis C Virus
DQAETAGARLV

SEQ ID NO: 158 - protein, 8 aa, Hepatitis C Virus
DTAACGDI

SEQ ID NO: 159 - protein, 9 aa, Hepatitis C Virus
DTAACGDII

SEQ ID NO: 160 - protein, 8 aa, Hepatitis C Virus
DTLTCGFA

SEQ ID NO: 161 - protein, 10 aa, Hepatitis C Virus
DTLTCGFADL

SEQ ID NO: 162 - protein, 11 aa, Hepatitis C Virus
DTLTCGFADLM

SEQ ID NO: 163 - protein, 8 aa, Hepatitis C Virus
DTRCFDST

SEQ ID NO: 164 - protein, 9 aa, Hepatitis C Virus
DTRCFDSTV

SEQ ID NO: 165 - protein, 10 aa, Hepatitis C Virus
DTRCFDSTVT

SEQ ID NO: 166 - protein, 10 aa, Hepatitis C Virus
DVKFPGGGQI

SEQ ID NO: 167 - protein, 11 aa, Hepatitis C Virus
DVKFPGGGQIV

SEQ ID NO: 168 - protein, 8 aa, Hepatitis C Virus
EAALENLV

SEQ ID NO: 169 - protein, 8 aa, Hepatitis C Virus
EAMTRYSA

SEQ ID NO: 170 - protein, 10 aa, Hepatitis C Virus
EANLLWRQEM

SEQ ID NO: 171 - protein, 8 aa, Hepatitis C Virus
EIPFYGKA

SEQ ID NO: 172 - protein, 9 aa, Hepatitis C Virus
EIPFYGKAI

SEQ ID NO: 173 - protein, 10 aa, Hepatitis C Virus
ELITSCSSNV

SEQ ID NO: 174 - protein, 9 aa, Hepatitis C Virus
ELSPLLLST

SEQ ID NO: 175 - protein, 10 aa, Hepatitis C Virus
ELSPLLLSTT

SEQ ID NO: 176 - protein, 9 aa, Hepatitis C Virus
EMGGNITRV

SEQ ID NO: 177 - protein, 8 aa, Hepatitis C Virus
EQFKQKAL

SEQ ID NO: 178 - protein, 10 aa, Hepatitis C Virus
EQFKQKALGL

SEQ ID NO: 179 - protein, 11 aa, Hepatitis C Virus
EQFKQKALGLL

SEQ ID NO: 180 - protein, 8 aa, Hepatitis C Virus
ETAGARLV

SEQ ID NO: 181 - protein, 9 aa, Hepatitis C Virus
ETAGARLVV

SEQ ID NO: 182 - protein, 10 aa, Hepatitis C Virus
ETAGARLVVL

SEQ ID NO: 183 - protein, 11 aa, Hepatitis C Virus
ETAGARLVVLA

SEQ ID NO: 184 - protein, 8 aa, Hepatitis C Virus
ETTMRSPV

SEQ ID NO: 185 - protein, 10 aa, Hepatitis C Virus
ETTMRSPVFT

SEQ ID NO: 186 - protein, 8 aa, Hepatitis C Virus
EVVTSTWV

SEQ ID NO: 187 - protein, 9 aa, Hepatitis C Virus
EVVTSTWVL

SEQ ID NO: 188 - protein, 10 aa, Hepatitis C Virus
EVVTSTWVLV

SEQ ID NO: 189 - protein, 8 aa, Hepatitis C Virus
FADLMGYI

SEQ ID NO: 190 - protein, 10 aa, Hepatitis C Virus
FADLMGYIPL

SEQ ID NO: 191 - protein, 11 aa, Hepatitis C Virus
FADLMGYIPLV

SEQ ID NO: 192 - protein, 8 aa, Hepatitis C Virus
FASRGNHV

SEQ ID NO: 193 - protein, 11 aa, Hepatitis C Virus
FASRGNHVSPT

SEQ ID NO: 194 - protein, 8 aa, Hepatitis C Virus
FISGIQYL

SEQ ID NO: 195 - protein, 9 aa, Hepatitis C Virus
FISGIQYLA

SEQ ID NO: 196 - protein, 11 aa, Hepatitis C Virus
FISGIQYLAGL

SEQ ID NO: 197 - protein, 11 aa, Hepatitis C Virus
FLADGGCSGGA

SEQ ID NO: 198 - protein, 9 aa, Hepatitis C Virus
FLLALLSCL

SEQ ID NO: 199 - protein, 10 aa, Hepatitis C Virus
FLLALLSCLT

SEQ ID NO: 200 - protein, 9 aa, Hepatitis C Virus
FLLLADARV

SEQ ID NO: 201 - protein, 8 aa, Hepatitis C Virus
FQVAHLHA

SEQ ID NO: 202 - protein, 10 aa, Hepatitis C Virus
FQVAHLHAPT

SEQ ID NO: 203 - protein, 9 aa, Hepatitis C Virus
FQYSPGQRV

SEQ ID NO: 204 - protein, 10 aa, Hepatitis C Virus
FTEAMTRYSA

SEQ ID NO: 205 - protein, 9 aa, Hepatitis C Virus
FTGLTHIDA

SEQ ID NO: 206 - protein, 8 aa, Hepatitis C Virus
FTPSPVVV

SEQ ID NO: 207 - protein, 10 aa, Hepatitis C Virus
FTPSPVVVGT

SEQ ID NO: 208 - protein, 11 aa, Hepatitis C Virus
FTPSPVVVGTT

SEQ ID NO: 209 - protein, 9 aa, Hepatitis C Virus
FTTLPALST

SEQ ID NO: 210 - protein, 11 aa, Hepatitis C Virus
FTTLPALSTGL

SEQ ID NO: 211 - protein, 10 aa, Hepatitis C Virus
GAARALAHGV

SEQ ID NO: 212 - protein, 10 aa, Hepatitis C Virus
GADTAACGDI

SEQ ID NO: 213 - protein, 11 aa, Hepatitis C Virus
GADTAACGDII

SEQ ID NO: 214 - protein, 8 aa, Hepatitis C Virus
GAGVAGAL

SEQ ID NO: 215 - protein, 9 aa, Hepatitis C Virus
GAGVAGALV

SEQ ID NO: 216 - protein, 10 aa, Hepatitis C Virus
GAGVAGALVA

SEQ ID NO: 217 - protein, 8 aa, Hepatitis C Virus
GAHWGVLA

SEQ ID NO: 218 - protein, 8 aa, Hepatitis C Virus
GALVVGVV

SEQ ID NO: 219 - protein, 10 aa, Hepatitis C Virus
GALVVGVVCA

SEQ ID NO: 220 - protein, 11 aa, Hepatitis C Virus
GALVVGVVCAA

SEQ ID NO: 221 - protein, 8 aa, Hepatitis C Virus
GARLVVLA

SEQ ID NO: 222 - protein, 9 aa, Hepatitis C Virus
GARLVVLAT

SEQ ID NO: 223 - protein, 10 aa, Hepatitis C Virus
GARLVVLATA

SEQ ID NO: 224 - protein, 11 aa, Hepatitis C Virus
GARLVVLATAT

SEQ ID NO: 225 - protein, 9 aa, Hepatitis C Virus
GAVQWMNRL

SEQ ID NO: 226 - protein, 10 aa, Hepatitis C Virus
GAVQWMNRLI

SEQ ID NO: 227 - protein, 11 aa, Hepatitis C Virus
GAVQWMNRLIA

SEQ ID NO: 228 - protein, 9 aa, Hepatitis C Virus
GIGTVLDQA

SEQ ID NO: 229 - protein, 11 aa, Hepatitis C Virus
GIGTVLDQAET

SEQ ID NO: 230 - protein, 8 aa, Hepatitis C Virus
GIQYLAGL

SEQ ID NO: 231 - protein, 10 aa, Hepatitis C Virus
GIQYLAGLST

SEQ ID NO: 232 - protein, 11 aa, Hepatitis C Virus
GIQYLAGLSTL

SEQ ID NO: 233 - protein, 9 aa, Hepatitis C Virus
GLDVSVIPT

SEQ ID NO: 234 - protein, 9 aa, Hepatitis C Virus
GLPVCQDHL

SEQ ID NO: 235 - protein, 8 aa, Hepatitis C Virus
GLRDLAVA

SEQ ID NO: 236 - protein, 9 aa, Hepatitis C Virus
GLRDLAVAV

SEQ ID NO: 237 - protein, 10 aa, Hepatitis C Virus
GLSTLPGNPA

SEQ ID NO: 238 - protein, 11 aa, Hepatitis C Virus
GLSTLPGNPAI

SEQ ID NO: 239 - protein, 10 aa, Hepatitis C Virus
GLTHIDAHFL

SEQ ID NO: 240 - protein, 9 aa, Hepatitis C Virus
GQIVGGVYL

SEQ ID NO: 241 - protein, 10 aa, Hepatitis C Virus
GQIVGGVYLL

SEQ ID NO: 242 - protein, 9 aa, Hepatitis C Virus
GTFPINAYT

SEQ ID NO: 243 - protein, 10 aa, Hepatitis C Virus
GTFPINAYTT

SEQ ID NO: 244 - protein, 9 aa, Hepatitis C Virus
GTVLDQAET

SEQ ID NO: 245 - protein, 10 aa, Hepatitis C Virus
GTVLDQAETA

SEQ ID NO: 246 - protein, 8 aa, Hepatitis C Virus
GVAGALVA

SEQ ID NO: 247 - protein, 10 aa, Hepatitis C Virus
GVCWTVYHGA

SEQ ID NO: 248 - protein, 8 aa, Hepatitis C Virus
GVLAALAA

SEQ ID NO: 249 - protein, 11 aa, Hepatitis C Virus
GVLAALAAYCL

SEQ ID NO: 250 - protein, 9 aa, Hepatitis C Virus
GVNYATGNL

SEQ ID NO: 251 - protein, 8 aa, Hepatitis C Virus
GVRATRKT

SEQ ID NO: 252 - protein, 8 aa, Hepatitis C Virus
GVRVCEKM

SEQ ID NO: 253 - protein, 9 aa, Hepatitis C Virus
GVRVCEKMA

SEQ ID NO: 254 - protein, 10 aa, Hepatitis C Virus
GVRVCEKMAL

SEQ ID NO: 255 - protein, 9 aa, Hepatitis C Virus
GVRVLEDGV

SEQ ID NO: 256 - protein, 8 aa, Hepatitis C Virus
GVVCAAIL

SEQ ID NO: 257 - protein, 10 aa, Hepatitis C Virus
HAPTGSGKST

SEQ ID NO: 258 - protein, 10 aa, Hepatitis C Virus
HIDAHFLSQT

SEQ ID NO: 259 - protein, 9 aa, Hepatitis C Virus
HLHQNIVDV

SEQ ID NO: 260 - protein, 9 aa, Hepatitis C Virus
HLPYIEQGM

SEQ ID NO: 261 - protein, 9 aa, Hepatitis C Virus
HMWNFISGI

SEQ ID NO: 262 - protein, 10 aa, Hepatitis C Virus
HQNIVDVQYL

SEQ ID NO: 263 - protein, 9 aa, Hepatitis C Virus
HTPGCVPCV

SEQ ID NO: 264 - protein, 8 aa, Hepatitis C Virus
HTPVNSWL

SEQ ID NO: 265 - protein, 11 aa, Hepatitis C Virus
HTPVNSWLGNI

SEQ ID NO: 266 - protein, 8 aa, Hepatitis C Virus
HVGPGEGA

SEQ ID NO: 267 - protein, 9 aa, Hepatitis C Virus
HVGPGEGAV

SEQ ID NO: 268 - protein, 8 aa, Hepatitis C Virus
HVSPTHYV

SEQ ID NO: 269 - protein, 10 aa, Hepatitis C Virus
IAFASRGNHV

SEQ ID NO: 270 - protein, 9 aa, Hepatitis C Virus
ILAGYGAGV

SEQ ID NO: 271 - protein, 10 aa, Hepatitis C Virus
ILAGYGAGVA

SEQ ID NO: 272 - protein, 8 aa, Hepatitis C Virus
ILGGWVAA

SEQ ID NO: 273 - protein, 10 aa, Hepatitis C Virus
ILGGWVAAQL

SEQ ID NO: 274 - protein, 11 aa, Hepatitis C Virus
ILGGWVAAQLA

SEQ ID NO: 275 - protein, 8 aa, Hepatitis C Virus
ILGIGTVL

SEQ ID NO: 276 - protein, 11 aa, Hepatitis C Virus
ILGIGTVLDQA

SEQ ID NO: 277 - protein, 8 aa, Hepatitis C Virus
ILSPGALV

SEQ ID NO: 278 - protein, 9 aa, Hepatitis C Virus
ILSPGALVV

SEQ ID NO: 279 - protein, 11 aa, Hepatitis C Virus
ILSPGALVVGV

SEQ ID NO: 280 - protein, 10 aa, Hepatitis C Virus
IMAKNEVFCV

SEQ ID NO: 281 - protein, 9 aa, Hepatitis C Virus
IQYLAGLST

SEQ ID NO: 282 - protein, 10 aa, Hepatitis C Virus
IQYLAGLSTL

SEQ ID NO: 283 - protein, 10 aa, Hepatitis C Virus
ITRVESENKV

SEQ ID NO: 284 - protein, 11 aa, Hepatitis C Virus
ITRVESENKVV

SEQ ID NO: 285 - protein, 8 aa, Hepatitis C Virus
ITSCSSNV

SEQ ID NO: 286 - protein, 10 aa, Hepatitis C Virus
ITSCSSNVSV

SEQ ID NO: 287 - protein, 11 aa, Hepatitis C Virus
ITSCSSNVSVA

SEQ ID NO: 288 - protein, 8 aa, Hepatitis C Virus
ITWGADTA

SEQ ID NO: 289 - protein, 9 aa, Hepatitis C Virus
ITWGADTAA

SEQ ID NO: 290 - protein, 10 aa, Hepatitis C Virus
ITYSTYGKFL

SEQ ID NO: 291 - protein, 11 aa, Hepatitis C Virus
ITYSTYGKFLA

SEQ ID NO: 292 - protein, 8 aa, Hepatitis C Virus
IVFPDLGV

SEQ ID NO: 293 - protein, 10 aa, Hepatitis C Virus
IVFPDLGVRV

SEQ ID NO: 294 - protein, 8 aa, Hepatitis C Virus
IVGGVYLL

SEQ ID NO: 295 - protein, 8 aa, Hepatitis C Virus
KALGLLQT

SEQ ID NO: 296 - protein, 9 aa, Hepatitis C Virus
KALGLLQTA

SEQ ID NO: 297 - protein, 8 aa, Hepatitis C Virus
KMALYDVV

SEQ ID NO: 298 - protein, 8 aa, Hepatitis C Virus
KQKALGLL

SEQ ID NO: 299 - protein, 10 aa, Hepatitis C Virus
KQKALGLLQT

SEQ ID NO: 300 - protein, 11 aa, Hepatitis C Virus
KQKALGLLQTA

SEQ ID NO: 301 - protein, 11 aa, Hepatitis C Virus
KVIDTLTCGFA

SEQ ID NO: 302 - protein, 9 aa, Hepatitis C Virus
KVLVLNPSV

SEQ ID NO: 303 - protein, 10 aa, Hepatitis C Virus
KVLVLNPSVA

SEQ ID NO: 304 - protein, 11 aa, Hepatitis C Virus
KVLVLNPSVAA

SEQ ID NO: 305 - protein, 8 aa, Hepatitis C Virus
KVPAAYAA

SEQ ID NO: 306 - protein, 9 aa, Hepatitis C Virus
LAALAAYCL

SEQ ID NO: 307 - protein, 10 aa, Hepatitis C Virus
LADGGCSGGA

SEQ ID NO: 308 - protein, 9 aa, Hepatitis C Virus
LAEQFKQKA

SEQ ID NO: 309 - protein, 10 aa, Hepatitis C Virus
LAEQFKQKAL

SEQ ID NO: 310 - protein, 8 aa, Hepatitis C Virus
LAGYGAGV

SEQ ID NO: 311 - protein, 9 aa, Hepatitis C Virus
LAGYGAGVA

SEQ ID NO: 312 - protein, 11 aa, Hepatitis C Virus
LAGYGAGVAGA

SEQ ID NO: 313 - protein, 8 aa, Hepatitis C Virus
LAHGVRVL

SEQ ID NO: 314 - protein, 8 aa, Hepatitis C Virus
LALLSCLT

SEQ ID NO: 315 - protein, 8 aa, Hepatitis C Virus
LAVAVEPV

SEQ ID NO: 316 - protein, 11 aa, Hepatitis C Virus
LIAFASRGNHV

SEQ ID NO: 317 - protein, 9 aa, Hepatitis C Virus
LITSCSSNV

SEQ ID NO: 318 - protein, 11 aa, Hepatitis C Virus
LITSCSSNVSV

SEQ ID NO: 319 - protein, 9 aa, Hepatitis C Virus
LIVFPDLGV

SEQ ID NO: 320 - protein, 11 aa, Hepatitis C Virus
LIVFPDLGVRV

SEQ ID NO: 321 - protein, 8 aa, Hepatitis C Virus
LLALLSCL

SEQ ID NO: 322 - protein, 9 aa, Hepatitis C Virus
LLALLSCLT

SEQ ID NO: 323 - protein, 9 aa, Hepatitis C Virus
LLFLLLADA

SEQ ID NO: 324 - protein, 11 aa, Hepatitis C Virus
LLFLLLADARV

SEQ ID NO: 325 - protein, 10 aa, Hepatitis C Virus
LLFNILGGWV

SEQ ID NO: 326 - protein, 11 aa, Hepatitis C Virus
LLFNILGGWVA

SEQ ID NO: 327 - protein, 8 aa, Hepatitis C Virus
LLLADARV

SEQ ID NO: 328 - protein, 10 aa, Hepatitis C Virus
LLPAILSPGA

SEQ ID NO: 329 - protein, 11 aa, Hepatitis C Virus
LLPAILSPGAL

SEQ ID NO: 330 - protein, 9 aa, Hepatitis C Virus
LLPRRGPRL

SEQ ID NO: 331 - protein, 11 aa, Hepatitis C Virus
LLPRRGPRLGV

SEQ ID NO: 332 - protein, 11 aa, Hepatitis C Virus
LLWRQEMGGNI

SEQ ID NO: 333 - protein, 8 aa, Hepatitis C Virus
LLYRLGAV

SEQ ID NO: 334 - protein, 8 aa, Hepatitis C Virus
LMGYIPLV

SEQ ID NO: 335 - protein, 10 aa, Hepatitis C Virus
LMGYIPLVGA

SEQ ID NO: 336 - protein, 8 aa, Hepatitis C Virus
LQDCTMLV

SEQ ID NO: 337 - protein, 8 aa, Hepatitis C Virus
LTCGFADL

SEQ ID NO: 338 - protein, 9 aa, Hepatitis C Virus
LTCGFADLM

SEQ ID NO: 339 - protein, 8 aa, Hepatitis C Virus
LTDPSHIT

SEQ ID NO: 340 - protein, 9 aa, Hepatitis C Virus
LTDPSHITA

SEQ ID NO: 341 - protein, 9 aa, Hepatitis C Virus
LTGRDKNQV

SEQ ID NO: 342 - protein, 9 aa, Hepatitis C Virus
LTHIDAHFL

SEQ ID NO: 343 - protein, 11 aa, Hepatitis C Virus
LTSMLTDPSHI

SEQ ID NO: 344 - protein, 8 aa, Hepatitis C Virus
LTTSCGNT

SEQ ID NO: 345 - protein, 9 aa, Hepatitis C Virus
LTTSCGNTL

SEQ ID NO: 346 - protein, 10 aa, Hepatitis C Virus
LTTSCGNTLT

SEQ ID NO: 347 - protein, 8 aa, Hepatitis C Virus
LVAYQATV

SEQ ID NO: 348 - protein, 10 aa, Hepatitis C Virus
LVAYQATVCA

SEQ ID NO: 349 - protein, 10 aa, Hepatitis C Virus
LVDILAGYGA

SEQ ID NO: 350 - protein, 8 aa, Hepatitis C Virus
LVGGVLAA

SEQ ID NO: 351 - protein, 9 aa, Hepatitis C Virus
LVGGVLAAL

SEQ ID NO: 352 - protein, 10 aa, Hepatitis C Virus
LVGGVLAALA

SEQ ID NO: 353 - protein, 11 aa, Hepatitis C Virus
LVGGVLAALAA

SEQ ID NO: 354 - protein, 8 aa, Hepatitis C Virus
LVLNPSVA

SEQ ID NO: 355 - protein, 9 aa, Hepatitis C Virus
LVLNPSVAA

SEQ ID NO: 356 - protein, 10 aa, Hepatitis C Virus
LVLNPSVAAT

SEQ ID NO: 357 - protein, 11 aa, Hepatitis C Virus
LVLNPSVAATL

SEQ ID NO: 358 - protein, 8 aa, Hepatitis C Virus
LVNLLPAI

SEQ ID NO: 359 - protein, 9 aa, Hepatitis C Virus
LVNLLPAIL

SEQ ID NO: 360 - protein, 8 aa, Hepatitis C Virus
LVTRHADV

SEQ ID NO: 361 - protein, 9 aa, Hepatitis C Virus
LVTRHADVI

SEQ ID NO: 362 - protein, 11 aa, Hepatitis C Virus
LVTRHADVIPV

SEQ ID NO: 363 - protein, 8 aa, Hepatitis C Virus
LVVGVVCA

SEQ ID NO: 364 - protein, 9 aa, Hepatitis C Virus
LVVGVVCAA

SEQ ID NO: 365 - protein, 10 aa, Hepatitis C Virus
LVVGVVCAAI

SEQ ID NO: 366 - protein, 11 aa, Hepatitis C Virus
LVVGVVCAAIL

SEQ ID NO: 367 - protein, 8 aa, Hepatitis C Virus
LVVICESA

SEQ ID NO: 368 - protein, 8 aa, Hepatitis C Virus
LVVLATAT

SEQ ID NO: 369 - protein, 9 aa, Hepatitis C Virus
MAKNEVFCV

SEQ ID NO: 370 - protein, 8 aa, Hepatitis C Virus
MLTDPSHI

SEQ ID NO: 371 - protein, 9 aa, Hepatitis C Virus
MLTDPSHIT

SEQ ID NO: 372 - protein, 10 aa, Hepatitis C Virus
MLTDPSHITA

SEQ ID NO: 373 - protein, 8 aa, Hepatitis C Virus
MMMNWSPT

SEQ ID NO: 374 - protein, 9 aa, Hepatitis C Virus
NAVAYYRGL

SEQ ID NO: 375 - protein, 11 aa, Hepatitis C Virus
NAVAYYRGLDV

SEQ ID NO: 376 - protein, 9 aa, Hepatitis C Virus
NAYTTGPCT

SEQ ID NO: 377 - protein, 8 aa, Hepatitis C Virus
NILGGWVA

SEQ ID NO: 378 - protein, 9 aa, Hepatitis C Virus
NILGGWVAA

SEQ ID NO: 379 - protein, 11 aa, Hepatitis C Virus
NILGGWVAAQL

SEQ ID NO: 380 - protein, 8 aa, Hepatitis C Virus
NIRTGVRT

SEQ ID NO: 381 - protein, 9 aa, Hepatitis C Virus
NIRTGVRTI

SEQ ID NO: 382 - protein, 10 aa, Hepatitis C Virus
NIRTGVRTIT

SEQ ID NO: 383 - protein, 11 aa, Hepatitis C Virus
NIRTGVRTITT

SEQ ID NO: 384 - protein, 11 aa, Hepatitis C Virus
NITRVESENKV

SEQ ID NO: 385 - protein, 8 aa, Hepatitis C Virus
NIVDVQYL

SEQ ID NO: 386 - protein, 8 aa, Hepatitis C Virus
NLGKVIDT

SEQ ID NO: 387 - protein, 9 aa, Hepatitis C Virus
NLGKVIDTL

SEQ ID NO: 388 - protein, 10 aa, Hepatitis C Virus
NLGKVIDTLT

SEQ ID NO: 389 - protein, 11 aa, Hepatitis C Virus
NLLPAILSPGA

SEQ ID NO: 390 - protein, 8 aa, Hepatitis C Virus
NLLWRQEM

SEQ ID NO: 391 - protein, 9 aa, Hepatitis C Virus
NLPGCSFSI

SEQ ID NO: 392 - protein, 11 aa, Hepatitis C Virus
NLPGCSFSIFL

SEQ ID NO: 393 - protein, 8 aa, Hepatitis C Virus
NTCVTQTV

SEQ ID NO: 394 - protein, 8 aa, Hepatitis C Virus
NTNGSWHI

SEQ ID NO: 395 - protein, 9 aa, Hepatitis C Virus
NTNRRPQDV

SEQ ID NO: 396 - protein, 8 aa, Hepatitis C Virus
PAILSPGA

SEQ ID NO: 397 - protein, 9 aa, Hepatitis C Virus
PAILSPGAL

SEQ ID NO: 398 - protein, 10 aa, Hepatitis C Virus
PAILSPGALV

SEQ ID NO: 399 - protein, 11 aa, Hepatitis C Virus
PAILSPGALVV

SEQ ID NO: 400 - protein, 8 aa, Hepatitis C Virus
PALSTGLI

SEQ ID NO: 401 - protein, 10 aa, Hepatitis C Virus
PALSTGLIHL

SEQ ID NO: 402 - protein, 10 aa, Hepatitis C Virus
PARLIVFPDL

SEQ ID NO: 403 - protein, 11 aa, Hepatitis C Virus
PINAYTTGPCT

SEQ ID NO: 404 - protein, 11 aa, Hepatitis C Virus
PITYSTYGKFL

SEQ ID NO: 405 - protein, 11 aa, Hepatitis C Virus
PLEGEPGDPDL

SEQ ID NO: 406 - protein, 8 aa, Hepatitis C Virus
PLGGAARA

SEQ ID NO: 407 - protein, 9 aa, Hepatitis C Virus
PLGGAARAL

SEQ ID NO: 408 - protein, 10 aa, Hepatitis C Virus
PLGGAARALA

SEQ ID NO: 409 - protein, 8 aa, Hepatitis C Virus
PLLYRLGA

SEQ ID NO: 410 - protein, 9 aa, Hepatitis C Virus
PLLYRLGAV

SEQ ID NO: 411 - protein, 8 aa, Hepatitis C Virus
PMGFSYDT

SEQ ID NO: 412 - protein, 9 aa, Hepatitis C Virus
PQPEYDLEL

SEQ ID NO: 413 - protein, 10 aa, Hepatitis C Virus
PQPEYDLELI

SEQ ID NO: 414 - protein, 11 aa, Hepatitis C Virus
PQPEYDLELIT

SEQ ID NO: 415 - protein, 9 aa, Hepatitis C Virus
PQRKTKRNT

SEQ ID NO: 416 - protein, 11 aa, Hepatitis C Virus
PTDPRRRSRNL

SEQ ID NO: 417 - protein, 8 aa, Hepatitis C Virus
PTFTIETT

SEQ ID NO: 418 - protein, 9 aa, Hepatitis C Virus
PTFTIETTT

SEQ ID NO: 419 - protein, 8 aa, Hepatitis C Virus
PTGSGKST

SEQ ID NO: 420 - protein, 10 aa, Hepatitis C Virus
PTGSGKSTKV

SEQ ID NO: 421 - protein, 10 aa, Hepatitis C Virus
PTHYVPESDA

SEQ ID NO: 422 - protein, 11 aa, Hepatitis C Virus
PTHYVPESDAA

SEQ ID NO: 423 - protein, 9 aa, Hepatitis C Virus
PTLHGPTPL

SEQ ID NO: 424 - protein, 10 aa, Hepatitis C Virus
PTLHGPTPLL

SEQ ID NO: 425 - protein, 8 aa, Hepatitis C Virus
PTLWARMI

SEQ ID NO: 426 - protein, 9 aa, Hepatitis C Virus
PTLWARMIL

SEQ ID NO: 427 - protein, 10 aa, Hepatitis C Virus
PTLWARMILM

SEQ ID NO: 428 - protein, 11 aa, Hepatitis C Virus
PTLWARMILMT

SEQ ID NO: 429 - protein, 8 aa, Hepatitis C Virus
PTPLLYRL

SEQ ID NO: 430 - protein, 10 aa, Hepatitis C Virus
PTPLLYRLGA

SEQ ID NO: 431 - protein, 11 aa, Hepatitis C Virus
PTPLLYRLGAV

SEQ ID NO: 432 - protein, 9 aa, Hepatitis C Virus
PVNSWLGNI

SEQ ID NO: 433 - protein, 10 aa, Hepatitis C Virus
PVNSWLGNII

SEQ ID NO: 434 - protein, 11 aa, Hepatitis C Virus
PVNSWLGNIIM

SEQ ID NO: 435 - protein, 8 aa, Hepatitis C Virus
PVVHGCPL

SEQ ID NO: 436 - protein, 10 aa, Hepatitis C Virus
PVYCFTPSPV

SEQ ID NO: 437 - protein, 11 aa, Hepatitis C Virus
PVYCFTPSPVV

SEQ ID NO: 438 - protein, 9 aa, Hepatitis C Virus
QAETAGARL

SEQ ID NO: 439 - protein, 10 aa, Hepatitis C Virus
QAETAGARLV

SEQ ID NO: 440 - protein, 11 aa, Hepatitis C Virus
QAETAGARLVV

SEQ ID NO: 441 - protein, 10 aa, Hepatitis C Virus
QAPPPSWDQM

SEQ ID NO: 442 - protein, 8 aa, Hepatitis C Virus
QATVCARA

SEQ ID NO: 443 - protein, 10 aa, Hepatitis C Virus
QATVCARAQA

SEQ ID NO: 444 - protein, 8 aa, Hepatitis C Virus
QIVGGVYL

SEQ ID NO: 445 - protein, 9 aa, Hepatitis C Virus
QIVGGVYLL

SEQ ID NO: 446 - protein, 8 aa, Hepatitis C Virus
QLLRIPQA

SEQ ID NO: 447 - protein, 10 aa, Hepatitis C Virus
QLPCEPEPDV

SEQ ID NO: 448 - protein, 9 aa, Hepatitis C Virus
QLSAPSLKA

SEQ ID NO: 449 - protein, 10 aa, Hepatitis C Virus
QLSAPSLKAT

SEQ ID NO: 450 - protein, 10 aa, Hepatitis C Virus
QTVDFSLDPT

SEQ ID NO: 451 - protein, 9 aa, Hepatitis C Virus
QVAHLHAPT

SEQ ID NO: 452 - protein, 9 aa, Hepatitis C Virus
RAAVCTRGV

SEQ ID NO: 453 - protein, 10 aa, Hepatitis C Virus
RAAVCTRGVA

SEQ ID NO: 454 - protein, 9 aa, Hepatitis C Virus
RALAHGVRV

SEQ ID NO: 455 - protein, 10 aa, Hepatitis C Virus
RALAHGVRVL

SEQ ID NO: 456 - protein, 8 aa, Hepatitis C Virus
RASGVLTT

SEQ ID NO: 457 - protein, 10 aa, Hepatitis C Virus
RLGVRATRKT

SEQ ID NO: 458 - protein, 10 aa, Hepatitis C Virus
RLHGLSAFSL

SEQ ID NO: 459 - protein, 8 aa, Hepatitis C Virus
RLIVFPDL

SEQ ID NO: 460 - protein, 10 aa, Hepatitis C Virus
RLIVFPDLGV

SEQ ID NO: 461 - protein, 10 aa, Hepatitis C Virus
RLKPTLHGPT

SEQ ID NO: 462 - protein, 8 aa, Hepatitis C Virus
RLLAPITA

SEQ ID NO: 463 - protein, 8 aa, Hepatitis C Virus
RLVVLATA

SEQ ID NO: 464 - protein, 9 aa, Hepatitis C Virus
RLVVLATAT

SEQ ID NO: 465 - protein, 8 aa, Hepatitis C Virus
RLWHYPCT

SEQ ID NO: 466 - protein, 8 aa, Hepatitis C Virus
RMAWDMMM

SEQ ID NO: 467 - protein, 11 aa, Hepatitis C Virus
RMYVGGVEHRL

SEQ ID NO: 468 - protein, 8 aa, Hepatitis C Virus
RQEMGGNI

SEQ ID NO: 469 - protein, 9 aa, Hepatitis C Virus
RQEMGGNIT

SEQ ID NO: 470 - protein, 11 aa, Hepatitis C Virus
RQEMGGNITRV

SEQ ID NO: 471 - protein, 8 aa, Hepatitis C Virus
RTGVRTIT

SEQ ID NO: 472 - protein, 9 aa, Hepatitis C Virus
RTGVRTITT

SEQ ID NO: 473 - protein, 8 aa, Hepatitis C Virus
RVCEKMAL

SEQ ID NO: 474 - protein, 11 aa, Hepatitis C Virus
RVCEKMALYDV

SEQ ID NO: 475 - protein, 8 aa, Hepatitis C Virus
RVESENKV

SEQ ID NO: 476 - protein, 9 aa, Hepatitis C Virus
RVESENKVV

SEQ ID NO: 477 - protein, 8 aa, Hepatitis C Virus
RVGDFHYV

SEQ ID NO: 478 - protein, 10 aa, Hepatitis C Virus
RVLEDGVNYA

SEQ ID NO: 479 - protein, 11 aa, Hepatitis C Virus
RVLEDGVNYAT

SEQ ID NO: 480 - protein, 10 aa, Hepatitis C Virus
RVYYLTRDPT

SEQ ID NO: 481 - protein, 8 aa, Hepatitis C Virus
SADLEVVT

SEQ ID NO: 482 - protein, 10 aa, Hepatitis C Virus
SADLEVVTST

SEQ ID NO: 483 - protein, 8 aa, Hepatitis C Virus
SAPSLKAT

SEQ ID NO: 484 - protein, 10 aa, Hepatitis C Virus
SAPSLKATCT

SEQ ID NO: 485 - protein, 10 aa, Hepatitis C Virus
SASQLSAPSL

SEQ ID NO: 486 - protein, 8 aa, Hepatitis C Virus
SIFLLALL

SEQ ID NO: 487 - protein, 11 aa, Hepatitis C Virus
SIFLLALLSCL

SEQ ID NO: 488 - protein, 8 aa, Hepatitis C Virus
SLDPTFTI

SEQ ID NO: 489 - protein, 10 aa, Hepatitis C Virus
SLDPTFTIET

SEQ ID NO: 490 - protein, 11 aa, Hepatitis C Virus
SLDPTFTIETT

SEQ ID NO: 491 - protein, 10 aa, Hepatitis C Virus
SLHSYSPGEI

SEQ ID NO: 492 - protein, 10 aa, Hepatitis C Virus
SLTGRDKNQV

SEQ ID NO: 493 - protein, 9 aa, Hepatitis C Virus
SMLTDPSHI

SEQ ID NO: 494 - protein, 10 aa, Hepatitis C Virus
SMLTDPSHIT

SEQ ID NO: 495 - protein, 11 aa, Hepatitis C Virus
SMLTDPSHITA

SEQ ID NO: 496 - protein, 11 aa, Hepatitis C Virus
SQLPCEPEPDV

SEQ ID NO: 497 - protein, 8 aa, Hepatitis C Virus
SQLSAPSL

SEQ ID NO: 498 - protein, 10 aa, Hepatitis C Virus
SQLSAPSLKA

SEQ ID NO: 499 - protein, 11 aa, Hepatitis C Virus
SQLSAPSLKAT

SEQ ID NO: 500 - protein, 10 aa, Hepatitis C Virus
SQPRGRRQPI

SEQ ID NO: 501 - protein, 9 aa, Hepatitis C Virus
STKVPAAYA

SEQ ID NO: 502 - protein, 10 aa, Hepatitis C Virus
STKVPAAYAA

SEQ ID NO: 503 - protein, 8 aa, Hepatitis C Virus
STLPGNPA

SEQ ID NO: 504 - protein, 9 aa, Hepatitis C Virus
STLPGNPAI

SEQ ID NO: 505 - protein, 10 aa, Hepatitis C Virus
STNPKPQRKT

SEQ ID NO: 506 - protein, 9 aa, Hepatitis C Virus
STWVLVGGV

SEQ ID NO: 507 - protein, 10 aa, Hepatitis C Virus
STWVLVGGVL

SEQ ID NO: 508 - protein, 11 aa, Hepatitis C Virus
STWVLVGGVLA

SEQ ID NO: 509 - protein, 8 aa, Hepatitis C Virus
STYGKFLA

SEQ ID NO: 510 - protein, 10 aa, Hepatitis C Virus
SVAATLGFGA

SEQ ID NO: 511 - protein, 9 aa, Hepatitis C Virus
SVIDCNTCV

SEQ ID NO: 512 - protein, 10 aa, Hepatitis C Virus
SVIDCNTCVT

SEQ ID NO: 513 - protein, 8 aa, Hepatitis C Virus
TAACGDII

SEQ ID NO: 514 - protein, 8 aa, Hepatitis C Virus
TAGARLVV

SEQ ID NO: 515 - protein, 9 aa, Hepatitis C Virus
TAGARLVVL

SEQ ID NO: 516 - protein, 10 aa, Hepatitis C Virus
TAGARLVVLA

SEQ ID NO: 517 - protein, 11 aa, Hepatitis C Virus
TAGARLVVLAT

SEQ ID NO: 518 - protein, 11 aa, Hepatitis C Virus
TARHTPVNSWL

SEQ ID NO: 519 - protein, 8 aa, Hepatitis C Virus
TIMAKNEV

SEQ ID NO: 520 - protein, 8 aa, Hepatitis C Virus
TLGFGAYM

SEQ ID NO: 521 - protein, 11 aa, Hepatitis C Virus
TLGFGAYMSKA

SEQ ID NO: 522 - protein, 8 aa, Hepatitis C Virus
TLHGPTPL

SEQ ID NO: 523 - protein, 9 aa, Hepatitis C Virus
TLHGPTPLL

SEQ ID NO: 524 - protein, 11 aa, Hepatitis C Virus
TLLFNILGGWV

SEQ ID NO: 525 - protein, 9 aa, Hepatitis C Virus
TLPALSTGL

SEQ ID NO: 526 - protein, 10 aa, Hepatitis C Virus
TLPALSTGLI

SEQ ID NO: 527 - protein, 8 aa, Hepatitis C Virus
TLPGNPAI

SEQ ID NO: 528 - protein, 9 aa, Hepatitis C Virus
TLTCGFADL

SEQ ID NO: 529 - protein, 10 aa, Hepatitis C Virus
TLTCGFADLM

SEQ ID NO: 530 - protein, 8 aa, Hepatitis C Virus
TLWARMIL

SEQ ID NO: 531 - protein, 9 aa, Hepatitis C Virus
TLWARMILM

SEQ ID NO: 532 - protein, 10 aa, Hepatitis C Virus
TLWARMILMT

SEQ ID NO: 533 - protein, 8 aa, Hepatitis C Virus
TMRSPVFT

SEQ ID NO: 534 - protein, 8 aa, Hepatitis C Virus
TQTVDFSL

SEQ ID NO: 535 - protein, 11 aa, Hepatitis C Virus
TQTVDFSLDPT

SEQ ID NO: 536 - protein, 9 aa, Hepatitis C Virus
TTIMAKNEV

SEQ ID NO: 537 - protein, 8 aa, Hepatitis C Virus
TTLPALST

SEQ ID NO: 538 - protein, 10 aa, Hepatitis C Virus
TTLPALSTGL

SEQ ID NO: 539 - protein, 11 aa, Hepatitis C Virus
TTLPALSTGLI

SEQ ID NO: 540 - protein, 9 aa, Hepatitis C Virus
TTMRSPVFT

SEQ ID NO: 541 - protein, 8 aa, Hepatitis C Virus
TTSCGNTL

SEQ ID NO: 542 - protein, 9 aa, Hepatitis C Virus
TTSCGNTLT

SEQ ID NO: 543 - protein, 8 aa, Hepatitis C Virus
TVCARAQA

SEQ ID NO: 544 - protein, 9 aa, Hepatitis C Virus
TVDFSLDPT

SEQ ID NO: 545 - protein, 11 aa, Hepatitis C Virus
TVDFSLDPTFT

SEQ ID NO: 546 - protein, 8 aa, Hepatitis C Virus
TVLDQAET

SEQ ID NO: 547 - protein, 9 aa, Hepatitis C Virus
TVLDQAETA

SEQ ID NO: 548 - protein, 11 aa, Hepatitis C Virus
TVLDQAETAGA

SEQ ID NO: 549 - protein, 9 aa, Hepatitis C Virus
VAATLGFGA

SEQ ID NO: 550 - protein, 11 aa, Hepatitis C Virus
VAATLGFGAYM

SEQ ID NO: 551 - protein, 8 aa, Hepatitis C Virus
VAHLHAPT

SEQ ID NO: 552 - protein, 8 aa, Hepatitis C Virus
VATDALMT

SEQ ID NO: 553 - protein, 9 aa, Hepatitis C Virus
VAYQATVCA

SEQ ID NO: 554 - protein, 11 aa, Hepatitis C Virus
VAYQATVCARA

SEQ ID NO: 555 - protein, 9 aa, Hepatitis C Virus
VAYYRGLDV

SEQ ID NO: 556 - protein, 11 aa, Hepatitis C Virus
VAYYRGLDVSV

SEQ ID NO: 557 - protein, 8 aa, Hepatitis C Virus
VIDCNTCV

SEQ ID NO: 558 - protein, 9 aa, Hepatitis C Virus
VIDCNTCVT

SEQ ID NO: 559 - protein, 11 aa, Hepatitis C Virus
VIDCNTCVTQT

SEQ ID NO: 560 - protein, 10 aa, Hepatitis C Virus
VIDTLTCGFA

SEQ ID NO: 561 - protein, 10 aa, Hepatitis C Virus
VLAALAAYCL

SEQ ID NO: 562 - protein, 8 aa, Hepatitis C Virus
VLCECYDA

SEQ ID NO: 563 - protein, 11 aa, Hepatitis C Virus
VLCECYDAGCA

SEQ ID NO: 564 - protein, 8 aa, Hepatitis C Virus
VLDQAETA

SEQ ID NO: 565 - protein, 10 aa, Hepatitis C Virus
VLDQAETAGA

SEQ ID NO: 566 - protein, 9 aa, Hepatitis C Virus
VLEDGVNYA

SEQ ID NO: 567 - protein, 10 aa, Hepatitis C Virus
VLEDGVNYAT

SEQ ID NO: 568 - protein, 8 aa, Hepatitis C Virus
VLNPSVAA

SEQ ID NO: 569 - protein, 9 aa, Hepatitis C Virus
VLNPSVAAT

SEQ ID NO: 570 - protein, 10 aa, Hepatitis C Virus
VLNPSVAATL

SEQ ID NO: 571 - protein, 9 aa, Hepatitis C Virus
VLTTSCGNT

SEQ ID NO: 572 - protein, 10 aa, Hepatitis C Virus
VLTTSCGNTL

SEQ ID NO: 573 - protein, 11 aa, Hepatitis C Virus
VLTTSCGNTLT

SEQ ID NO: 574 - protein, 11 aa, Hepatitis C Virus
VLVDILAGYGA

SEQ ID NO: 575 - protein, 8 aa, Hepatitis C Virus
VLVGGVLA

SEQ ID NO: 576 - protein, 9 aa, Hepatitis C Virus
VLVGGVLAA

SEQ ID NO: 577 - protein, 10 aa, Hepatitis C Virus
VLVGGVLAAL

SEQ ID NO: 578 - protein, 11 aa, Hepatitis C Virus
VLVGGVLAALA

SEQ ID NO: 579 - protein, 8 aa, Hepatitis C Virus
VLVLNPSV

SEQ ID NO: 580 - protein, 9 aa, Hepatitis C Virus
VLVLNPSVA

SEQ ID NO: 581 - protein, 10 aa, Hepatitis C Virus
VLVLNPSVAA

SEQ ID NO: 582 - protein, 11 aa, Hepatitis C Virus
VLVLNPSVAAT

SEQ ID NO: 583 - protein, 11 aa, Hepatitis C Virus
VQPEKGGRKPA

SEQ ID NO: 584 - protein, 8 aa, Hepatitis C Virus
VQWMNRLI

SEQ ID NO: 585 - protein, 9 aa, Hepatitis C Virus
VQWMNRLIA

SEQ ID NO: 586 - protein, 11 aa, Hepatitis C Virus
VQWMNRLIAFA

SEQ ID NO: 587 - protein, 9 aa, Hepatitis C Virus
VTQTVDFSL

SEQ ID NO: 588 - protein, 8 aa, Hepatitis C Virus
VTRHADVI

SEQ ID NO: 589 - protein, 10 aa, Hepatitis C Virus
VTRHADVIPV

SEQ ID NO: 590 - protein, 8 aa, Hepatitis C Virus
VTSTWVLV

SEQ ID NO: 591 - protein, 11 aa, Hepatitis C Virus
VTSTWVLVGGV

SEQ ID NO: 592 - protein, 8 aa, Hepatitis C Virus
VVATDALM

SEQ ID NO: 593 - protein, 9 aa, Hepatitis C Virus
VVATDALMT

SEQ ID NO: 594 - protein, 11 aa, Hepatitis C Virus
VVCAAILRRHV

SEQ ID NO: 595 - protein, 8 aa, Hepatitis C Virus
VVGVVCAA

SEQ ID NO: 596 - protein, 9 aa, Hepatitis C Virus
VVGVVCAAI

SEQ ID NO: 597 - protein, 10 aa, Hepatitis C Virus
VVGVVCAAIL

SEQ ID NO: 598 - protein, 8 aa, Hepatitis C Virus
VVTSTWVL

SEQ ID NO: 599 - protein, 9 aa, Hepatitis C Virus
VVTSTWVLV

SEQ ID NO: 600 - protein, 9 aa, Hepatitis C Virus
WAKHMWNFI

SEQ ID NO: 601 - protein, 10 aa, Hepatitis C Virus
WAQPGYPWPL

SEQ ID NO: 602 - protein, 8 aa, Hepatitis C Virus
WARMILMT

SEQ ID NO: 603 - protein, 10 aa, Hepatitis C Virus
WARPDYNPPL

SEQ ID NO: 604 - protein, 9 aa, Hepatitis C Virus
WMNRLIAFA

SEQ ID NO: 605 - protein, 8 aa, Hepatitis C Virus
WMNSTGFT

SEQ ID NO: 606 - protein, 8 aa, Hepatitis C Virus
WVLVGGVL

SEQ ID NO: 607 - protein, 9 aa, Hepatitis C Virus
WVLVGGVLA

SEQ ID NO: 608 - protein, 10 aa, Hepatitis C Virus
WVLVGGVLAA

SEQ ID NO: 609 - protein, 11 aa, Hepatitis C Virus
WVLVGGVLAAL

SEQ ID NO: 610 - protein, 8 aa, Hepatitis C Virus
YAAQGYKV

SEQ ID NO: 611 - protein, 9 aa, Hepatitis C Virus
YAAQGYKVL

SEQ ID NO: 612 - protein, 10 aa, Hepatitis C Virus
YAAQGYKVLV

SEQ ID NO: 613 - protein, 11 aa, Hepatitis C Virus
YAAQGYKVLVL

SEQ ID NO: 614 - protein, 9 aa, Hepatitis C Virus
YIPLVGAPL

SEQ ID NO: 615 - protein, 8 aa, Hepatitis C Virus
YLAGLSTL

SEQ ID NO: 616 - protein, 10 aa, Hepatitis C Virus
YLKGSSGGPL

SEQ ID NO: 617 - protein, 11 aa, Hepatitis C Virus
YLKGSSGGPLL

SEQ ID NO: 618 - protein, 10 aa, Hepatitis C Virus
YLLPRRGPRL

SEQ ID NO: 619 - protein, 8 aa, Hepatitis C Virus
YLTRDPTT

SEQ ID NO: 620 - protein, 8 aa, Hepatitis C Virus
YLVAYQAT

SEQ ID NO: 621 - protein, 9 aa, Hepatitis C Virus
YLVAYQATV

SEQ ID NO: 622 - protein, 11 aa, Hepatitis C Virus
YLVAYQATVCA

SEQ ID NO: 623 - protein, 9 aa, Hepatitis C Virus
YLVTRHADV

SEQ ID NO: 624 - protein, 10 aa, Hepatitis C Virus
YLVTRHADVI

SEQ ID NO: 625 - protein, 9 aa, Hepatitis C Virus
YQATVCARA

SEQ ID NO: 626 - protein, 11 aa, Hepatitis C Virus
YQATVCARAQA

SEQ ID NO: 627 - protein, 8 aa, Hepatitis C Virus
YTNVDQDL

SEQ ID NO: 628 - protein, 9 aa, Hepatitis C Virus
YTNVDQDLV

SEQ ID NO: 629 - protein, 9 aa, Hepatitis C Virus
YVGDLCGSV

SEQ ID NO: 630 - protein, 11 aa, Hepatitis C Virus
YVGDLCGSVFL

SEQ ID NO: 631 - protein, 9 aa, Hepatitis C Virus
YVGGVEHRL

SEQ ID NO: 632 - protein, 8 aa, Hepatitis C Virus
YVPESDAA

SEQ ID NO: 633 - protein, 9 aa, Hepatitis C Virus
YVPESDAAA

SEQ ID NO: 634 - protein, 11 aa, Hepatitis C Virus
YVPESDAAARV

SEQ ID NO: 635 - protein, 10 aa, Hepatitis C Virus
AACNWTRGER

SEQ ID NO: 636 - protein, 10 aa, Hepatitis C Virus
AARALAHGVR

SEQ ID NO: 637 - protein, 10 aa, Hepatitis C Virus
AAVCTRGVAK

SEQ ID NO: 638 - protein, 10 aa, Hepatitis C Virus
ASQLSAPSLK

SEQ ID NO: 639 - protein, 11 aa, Hepatitis C Virus
ATLGFGAYMSK

SEQ ID NO: 640 - protein, 8 aa, Hepatitis C Virus
ATRKTSER

SEQ ID NO: 641 - protein, 9 aa, Hepatitis C Virus
AVCTRGVAK

SEQ ID NO: 642 - protein, 11 aa, Hepatitis C Virus
CLRKLGVPPLR

SEQ ID NO: 643 - protein, 11 aa, Hepatitis C Virus
CTWMNSTGFTK

SEQ ID NO: 644 - protein, 9 aa, Hepatitis C Virus
CVQPEKGGR

SEQ ID NO: 645 - protein, 10 aa, Hepatitis C Virus
CVQPEKGGRK

SEQ ID NO: 646 - protein, 9 aa, Hepatitis C Virus
DAHFLSQTK

SEQ ID NO: 647 - protein, 9 aa, Hepatitis C Virus
DLGVRVCEK

SEQ ID NO: 648 - protein, 8 aa, Hepatitis C Virus
DVIPVRRR

SEQ ID NO: 649 - protein, 8 aa, Hepatitis C Virus
EMGGNITR

SEQ ID NO: 650 - protein, 9 aa, Hepatitis C Virus
EVFCVQPEK

SEQ ID NO: 651 - protein, 8 aa, Hepatitis C Virus
FLLLADAR

SEQ ID NO: 652 - protein, 11 aa, Hepatitis C Virus
GAARALAHGVR

SEQ ID NO: 653 - protein, 8 aa, Hepatitis C Virus
GAVQWMNR

SEQ ID NO: 654 - protein, 8 aa, Hepatitis C Virus
GIYLLPNR

SEQ ID NO: 655 - protein, 8 aa, Hepatitis C Virus
GLPVSARR

SEQ ID NO: 656 - protein, 10 aa, Hepatitis C Virus
GSSDLYLVTR

SEQ ID NO: 657 - protein, 10 aa, Hepatitis C Virus
GVAGALVAFK

SEQ ID NO: 658 - protein, 10 aa, Hepatitis C Virus
GVGIYLLPNR

SEQ ID NO: 659 - protein, 11 aa, Hepatitis C Virus
GVRATRKTSER

SEQ ID NO: 660 - protein, 9 aa, Hepatitis C Virus
GVVCAAILR

SEQ ID NO: 661 - protein, 10 aa, Hepatitis C Virus
GVVCAAILRR

SEQ ID NO: 662 - protein, 8 aa, Hepatitis C Virus
GVYLLPRR

SEQ ID NO: 663 - protein, 11 aa, Hepatitis C Virus
GVYLLPRRGPR

SEQ ID NO: 664 - protein, 8 aa, Hepatitis C Virus
HADVIPVR

SEQ ID NO: 665 - protein, 9 aa, Hepatitis C Virus
HADVIPVRR

SEQ ID NO: 666 - protein, 10 aa, Hepatitis C Virus
HADVIPVRRR

SEQ ID NO: 667 - protein, 8 aa, Hepatitis C Virus
HAPTGSGK

SEQ ID NO: 668 - protein, 11 aa, Hepatitis C Virus
HAPTGSGKSTK

SEQ ID NO: 669 - protein, 11 aa, Hepatitis C Virus
HIDAHFLSQTK

SEQ ID NO: 670 - protein, 10 aa, Hepatitis C Virus
HLHAPTGSGK

SEQ ID NO: 671 - protein, 8 aa, Hepatitis C Virus
HLIFCHSK

SEQ ID NO: 672 - protein, 9 aa, Hepatitis C Virus
HLIFCHSKK

SEQ ID NO: 673 - protein, 10 aa, Hepatitis C Virus
HLIFCHSKKK

SEQ ID NO: 674 - protein, 10 aa, Hepatitis C Virus
HSYSPGEINR

SEQ ID NO: 675 - protein, 10 aa, Hepatitis C Virus
HTPGCVPCVR

SEQ ID NO: 676 - protein, 9 aa, Hepatitis C Virus
ITRVESENK

SEQ ID NO: 677 - protein, 8 aa, Hepatitis C Virus
ITYSTYGK

SEQ ID NO: 678 - protein, 9 aa, Hepatitis C Virus
IVFPDLGVR

SEQ ID NO: 679 - protein, 10 aa, Hepatitis C Virus
IVGGVYLLPR

SEQ ID NO: 680 - protein, 11 aa, Hepatitis C Virus
IVGGVYLLPRR

SEQ ID NO: 681 - protein, 8 aa, Hepatitis C Virus
KLGVPPLR

SEQ ID NO: 682 - protein, 8 aa, Hepatitis C Virus
KTKRNTNR

SEQ ID NO: 683 - protein, 9 aa, Hepatitis C Virus
KTKRNTNRR

SEQ ID NO: 684 - protein, 9 aa, Hepatitis C Virus
KTSERSQPR

SEQ ID NO: 685 - protein, 11 aa, Hepatitis C Virus
KTSERSQPRGR

SEQ ID NO: 686 - protein, 8 aa, Hepatitis C Virus
LAEQFKQK

SEQ ID NO: 687 - protein, 9 aa, Hepatitis C Virus
LIEANLLWR

SEQ ID NO: 688 - protein, 8 aa, Hepatitis C Virus
LIFCHSKK

SEQ ID NO: 689 - protein, 9 aa, Hepatitis C Virus
LIFCHSKKK

SEQ ID NO: 690 - protein, 10 aa, Hepatitis C Virus
LIVFPDLGVR

SEQ ID NO: 691 - protein, 10 aa, Hepatitis C Virus
LLFLLLADAR

SEQ ID NO: 692 - protein, 8 aa, Hepatitis C Virus
LLPRRGPR

SEQ ID NO: 693 - protein, 8 aa, Hepatitis C Virus
LLSPRGSR

SEQ ID NO: 694 - protein, 11 aa, Hepatitis C Virus
LVAYQATVCAR

SEQ ID NO: 695 - protein, 9 aa, Hepatitis C Virus
MSTNPKPQR

SEQ ID NO: 696 - protein, 10 aa, Hepatitis C Virus
MSTNPKPQRK

SEQ ID NO: 697 - protein, 10 aa, Hepatitis C Virus
NITRVESENK

SEQ ID NO: 698 - protein, 10 aa, Hepatitis C Virus
NTNRRPQDVK

SEQ ID NO: 699 - protein, 9 aa, Hepatitis C Virus
PITYSTYGK

SEQ ID NO: 700 - protein, 9 aa, Hepatitis C Virus
PMGFSYDTR

SEQ ID NO: 701 - protein, 11 aa, Hepatitis C Virus
PSPVVVGTTDR

SEQ ID NO: 702 - protein, 8 aa, Hepatitis C Virus
PSWDQMWK

SEQ ID NO: 703 - protein, 9 aa, Hepatitis C Virus
PTDPRRRSR

SEQ ID NO: 704 - protein, 9 aa, Hepatitis C Virus
PTGSGKSTK

SEQ ID NO: 705 - protein, 9 aa, Hepatitis C Virus
PVVVGTTDR

SEQ ID NO: 706 - protein, 8 aa, Hepatitis C Virus
QAETAGAR

SEQ ID NO: 707 - protein, 11 aa, Hepatitis C Virus
QIVGGVYLLPR

SEQ ID NO: 708 - protein, 8 aa, Hepatitis C Virus
QLFTFSPR

SEQ ID NO: 709 - protein, 9 aa, Hepatitis C Virus
QLFTFSPRR

SEQ ID NO: 710 - protein, 8 aa, Hepatitis C Virus
QLSAPSLK

SEQ ID NO: 711 - protein, 11 aa, Hepatitis C Virus
RAAVCTRGVAK

SEQ ID NO: 712 - protein, 8 aa, Hepatitis C Virus
RALAHGVR

SEQ ID NO: 713 - protein, 9 aa, Hepatitis C Virus
RATRKTSER

SEQ ID NO: 714 - protein, 8 aa, Hepatitis C Virus
RLGVRATR

SEQ ID NO: 715 - protein, 9 aa, Hepatitis C Virus
RLGVRATRK

SEQ ID NO: 716 - protein, 8 aa, Hepatitis C Virus
RLIAFASR

SEQ ID NO: 717 - protein, 11 aa, Hepatitis C Virus
RLIVFPDLGVR

SEQ ID NO: 718 - protein, 10 aa, Hepatitis C Virus
RMYVGGVEHR

SEQ ID NO: 719 - protein, 8 aa, Hepatitis C Virus
RSQPRGRR

SEQ ID NO: 720 - protein, 11 aa, Hepatitis C Virus
SASQLSAPSLK

SEQ ID NO: 721 - protein, 9 aa, Hepatitis C Virus
SSDLYLVTR

SEQ ID NO: 722 - protein, 8 aa, Hepatitis C Virus
STNPKPQR

SEQ ID NO: 723 - protein, 9 aa, Hepatitis C Virus
STNPKPQRK

SEQ ID NO: 724 - protein, 11 aa, Hepatitis C Virus
STNPKPQRKTK

SEQ ID NO: 725 - protein, 10 aa, Hepatitis C Virus
TLGFGAYMSK

SEQ ID NO: 726 - protein, 11 aa, Hepatitis C Virus
TLHGPTPLLYR

SEQ ID NO: 727 - protein, 8 aa, Hepatitis C Virus
TSERSQPR

SEQ ID NO: 728 - protein, 10 aa, Hepatitis C Virus
TSERSQPRGR

SEQ ID NO: 729 - protein, 11 aa, Hepatitis C Virus
TSERSQPRGRR

SEQ ID NO: 730 - protein, 8 aa, Hepatitis C Virus
TSLTGRDK

SEQ ID NO: 731 - protein, 9 aa, Hepatitis C Virus
VAGALVAFK

SEQ ID NO: 732 - protein, 10 aa, Hepatitis C Virus
VAYQATVCAR

SEQ ID NO: 733 - protein, 11 aa, Hepatitis C Virus
VLDQAETAGAR

SEQ ID NO: 734 - protein, 11 aa, Hepatitis C Virus
VTRHADVIPVR

SEQ ID NO: 735 - protein, 8 aa, Hepatitis C Virus
VVCAAILR

SEQ ID NO: 736 - protein, 9 aa, Hepatitis C Virus
VVCAAILRR

SEQ ID NO: 737 - protein, 11 aa, Hepatitis C Virus
VVGVVCAAILR

SEQ ID NO: 738 - protein, 8 aa, Hepatitis C Virus
VVVGTTDR

SEQ ID NO: 739 - protein, 9 aa, Hepatitis C Virus
WAGWLLSPR

SEQ ID NO: 740 - protein, 9 aa, Hepatitis C Virus
WLLSPRGSR

SEQ ID NO: 741 - protein, 11 aa, Hepatitis C Virus
WMNRLIAFASR

SEQ ID NO: 742 - protein, 9 aa, Hepatitis C Virus
WMNSTGFTK

SEQ ID NO: 743 - protein, 9 aa, Hepatitis C Virus
YLLPRRGPR

SEQ ID NO: 744 - protein, 8 aa, Hepatitis C Virus
YSPGEINR

SEQ ID NO: 745 - protein, 8 aa, Hepatitis C Virus
YVGGVEHR

SEQ ID NO: 746 - protein, 10 aa, Hepatitis C Virus
YVPESDAAAR

SEQ ID NO: 747 - protein, 8 aa, Hepatitis C Virus
AILSPGAL

SEQ ID NO: 748 - protein, 9 aa, Hepatitis C Virus
ALAHGVRVL

SEQ ID NO: 749 - protein, 9 aa, Hepatitis C Virus
ALSTGLIHL

SEQ ID NO: 750 - protein, 11 aa, Hepatitis C Virus
ALVVGVVCAAI

SEQ ID NO: 751 - protein, 10 aa, Hepatitis C Virus
ATGNLPGCSF

SEQ ID NO: 752 - protein, 8 aa, Hepatitis C Virus
ATLGFGAY

SEQ ID NO: 753 - protein, 9 aa, Hepatitis C Virus
ATLGFGAYM

SEQ ID NO: 754 - protein, 8 aa, Hepatitis C Virus
AVAYYRGL

SEQ ID NO: 755 - protein, 8 aa, Hepatitis C Virus
AVQWMNRL

SEQ ID NO: 756 - protein, 9 aa, Hepatitis C Virus
AVQWMNRLI

SEQ ID NO: 757 - protein, 11 aa, Hepatitis C Virus
AVQWMNRLIAF

SEQ ID NO: 758 - protein, 8 aa, Hepatitis C Virus
AWDMMMNW

SEQ ID NO: 759 - protein, 10 aa, Hepatitis C Virus
AYAAQGYKVL

SEQ ID NO: 760 - protein, 11 aa, Hepatitis C Virus
AYYRGLDVSVI

SEQ ID NO: 761 - protein, 10 aa, Hepatitis C Virus
CLRKLGVPPL

SEQ ID NO: 762 - protein, 8 aa, Hepatitis C Virus
CLWMMLLI

SEQ ID NO: 763 - protein, 8 aa, Hepatitis C Virus
CTCGSSDL

SEQ ID NO: 764 - protein, 9 aa, Hepatitis C Virus
CTCGSSDLY

SEQ ID NO: 765 - protein, 10 aa, Hepatitis C Virus
CTCGSSDLYL

SEQ ID NO: 766 - protein, 11 aa, Hepatitis C Virus
CTRGVAKAVDF

SEQ ID NO: 767 - protein, 9 aa, Hepatitis C Virus
CTWMNSTGF

SEQ ID NO: 768 - protein, 8 aa, Hepatitis C Virus
CVTQTVDF

SEQ ID NO: 769 - protein, 10 aa, Hepatitis C Virus
CVTQTVDFSL

SEQ ID NO: 770 - protein, 8 aa, Hepatitis C Virus
CYDAGCAW

SEQ ID NO: 771 - protein, 9 aa, Hepatitis C Virus
CYDAGCAWY

SEQ ID NO: 772 - protein, 11 aa, Hepatitis C Virus
CYDAGCAWYEL

SEQ ID NO: 773 - protein, 8 aa, Hepatitis C Virus
DFSLDPTF

SEQ ID NO: 774 - protein, 10 aa, Hepatitis C Virus
DFSLDPTFTI

SEQ ID NO: 775 - protein, 8 aa, Hepatitis C Virus
DLCGSVFL

SEQ ID NO: 776 - protein, 9 aa, Hepatitis C Virus
DLEVVTSTW

SEQ ID NO: 777 - protein, 11 aa, Hepatitis C Virus
DLEVVTSTWVL

SEQ ID NO: 778 - protein, 10 aa, Hepatitis C Virus
DLGVRVCEKM

SEQ ID NO: 779 - protein, 8 aa, Hepatitis C Virus
DLMGYIPL

SEQ ID NO: 780 - protein, 9 aa, Hepatitis C Virus
DLVNLLPAI

SEQ ID NO: 781 - protein, 10 aa, Hepatitis C Virus
DLVNLLPAIL

SEQ ID NO: 782 - protein, 8 aa, Hepatitis C Virus
DTAACGDI

SEQ ID NO: 783 - protein, 9 aa, Hepatitis C Virus
DTAACGDII

SEQ ID NO: 784 - protein, 10 aa, Hepatitis C Virus
DTLTCGFADL

SEQ ID NO: 785 - protein, 11 aa, Hepatitis C Virus
DTLTCGFADLM

SEQ ID NO: 786 - protein, 10 aa, Hepatitis C Virus
DVKFPGGGQI

SEQ ID NO: 787 - protein, 9 aa, Hepatitis C Virus
DYPYRLWHY

SEQ ID NO: 788 - protein, 9 aa, Hepatitis C Virus
EIPFYGKAI

SEQ ID NO: 789 - protein, 10 aa, Hepatitis C Virus
ETAGARLVVL

SEQ ID NO: 790 - protein, 9 aa, Hepatitis C Virus
ETTMRSPVF

SEQ ID NO: 791 - protein, 9 aa, Hepatitis C Virus
EVVTSTWVL

SEQ ID NO: 792 - protein, 8 aa, Hepatitis C Virus
FISGIQYL

SEQ ID NO: 793 - protein, 11 aa, Hepatitis C Virus
FISGIQYLAGL

SEQ ID NO: 794 - protein, 9 aa, Hepatitis C Virus
FLLALLSCL

SEQ ID NO: 795 - protein, 8 aa, Hepatitis C Virus
FTEAMTRY

SEQ ID NO: 796 - protein, 11 aa, Hepatitis C Virus
FTGLTHIDAHF

SEQ ID NO: 797 - protein, 11 aa, Hepatitis C Virus
FTTLPALSTGL

SEQ ID NO: 798 - protein, 9 aa, Hepatitis C Virus
FWAKHMWNF

SEQ ID NO: 799 - protein, 10 aa, Hepatitis C Virus
FWAKHMWNFI

SEQ ID NO: 800 - protein, 8 aa, Hepatitis C Virus
GFADLMGY

SEQ ID NO: 801 - protein, 9 aa, Hepatitis C Virus
GFADLMGYI

SEQ ID NO: 802 - protein, 11 aa, Hepatitis C Virus
GFADLMGYIPL

SEQ ID NO: 803 - protein, 9 aa, Hepatitis C Virus
GFSYDTRCF

SEQ ID NO: 804 - protein, 8 aa, Hepatitis C Virus
GIQYLAGL

SEQ ID NO: 805 - protein, 11 aa, Hepatitis C Virus
GIQYLAGLSTL

SEQ ID NO: 806 - protein, 9 aa, Hepatitis C Virus
GLPVCQDHL

SEQ ID NO: 807 - protein, 11 aa, Hepatitis C Virus
GLPVCQDHLEF

SEQ ID NO: 808 - protein, 10 aa, Hepatitis C Virus
GLSAFSLHSY

SEQ ID NO: 809 - protein, 11 aa, Hepatitis C Virus
GLSTLPGNPAI

SEQ ID NO: 810 - protein, 9 aa, Hepatitis C Virus
GLTHIDAHF

SEQ ID NO: 811 - protein, 10 aa, Hepatitis C Virus
GLTHIDAHFL

SEQ ID NO: 812 - protein, 8 aa, Hepatitis C Virus
GTFPINAY

SEQ ID NO: 813 - protein, 9 aa, Hepatitis C Virus
GVAGALVAF

SEQ ID NO: 814 - protein, 8 aa, Hepatitis C Virus
GVAKAVDF

SEQ ID NO: 815 - protein, 9 aa, Hepatitis C Virus
GVLAALAAY

SEQ ID NO: 816 - protein, 11 aa, Hepatitis C Virus
GVLAALAAYCL

SEQ ID NO: 817 - protein, 9 aa, Hepatitis C Virus
GVNYATGNL

SEQ ID NO: 818 - protein, 8 aa, Hepatitis C Virus
GVRVCEKM

SEQ ID NO: 819 - protein, 10 aa, Hepatitis C Virus
GVRVCEKMAL

SEQ ID NO: 820 - protein, 11 aa, Hepatitis C Virus
GVRVCEKMALY

SEQ ID NO: 821 - protein, 11 aa, Hepatitis C Virus
GVRVLEDGVNY

SEQ ID NO: 822 - protein, 8 aa, Hepatitis C Virus
GVVCAAIL

SEQ ID NO: 823 - protein, 8 aa, Hepatitis C Virus
GWRLLAPI

SEQ ID NO: 824 - protein, 11 aa, Hepatitis C Virus
GWRLLAPITAY

SEQ ID NO: 825 - protein, 10 aa, Hepatitis C Virus
GYGAGVAGAL

SEQ ID NO: 826 - protein, 10 aa, Hepatitis C Virus
GYIPLVGAPL

SEQ ID NO: 827 - protein, 11 aa, Hepatitis C Virus
GYRRCRASGVL

SEQ ID NO: 828 - protein, 11 aa, Hepatitis C Virus
HLHQNIVDVQY

SEQ ID NO: 829 - protein, 9 aa, Hepatitis C Virus
HLPYIEQGM

SEQ ID NO: 830 - protein, 9 aa, Hepatitis C Virus
HMWNFISGI

SEQ ID NO: 831 - protein, 11 aa, Hepatitis C Virus
HMWNFISGIQY

SEQ ID NO: 832 - protein, 8 aa, Hepatitis C Virus
HTPVNSWL

SEQ ID NO: 833 - protein, 11 aa, Hepatitis C Virus
HTPVNSWLGNI

SEQ ID NO: 834 - protein, 11 aa, Hepatitis C Virus
HVGPGEGAVQW

SEQ ID NO: 835 - protein, 10 aa, Hepatitis C Virus
IFLLALLSCL

SEQ ID NO: 836 - protein, 10 aa, Hepatitis C Virus
ILGGWVAAQL

SEQ ID NO: 837 - protein, 8 aa, Hepatitis C Virus
ILGIGTVL

SEQ ID NO: 838 - protein, 8 aa, Hepatitis C Virus
IMAKNEVF

SEQ ID NO: 839 - protein, 9 aa, Hepatitis C Virus
ITYSTYGKF

SEQ ID NO: 840 - protein, 10 aa, Hepatitis C Virus
ITYSTYGKFL

SEQ ID NO: 841 - protein, 8 aa, Hepatitis C Virus
IVDVQYLY

SEQ ID NO: 842 - protein, 8 aa, Hepatitis C Virus
IVGGVYLL

SEQ ID NO: 843 - protein, 8 aa, Hepatitis C Virus
KFPGGGQI

SEQ ID NO: 844 - protein, 10 aa, Hepatitis C Virus
KVIDTLTCGF

SEQ ID NO: 845 - protein, 8 aa, Hepatitis C Virus
LFNILGGW

SEQ ID NO: 846 - protein, 8 aa, Hepatitis C Virus
LIEANLLW

SEQ ID NO: 847 - protein, 8 aa, Hepatitis C Virus
LINTNGSW

SEQ ID NO: 848 - protein, 8 aa, Hepatitis C Virus
LLALLSCL

SEQ ID NO: 849 - protein, 8 aa, Hepatitis C Virus
LLAPITAY

SEQ ID NO: 850 - protein, 9 aa, Hepatitis C Virus
LLFNILGGW

SEQ ID NO: 851 - protein, 11 aa, Hepatitis C Virus
LLPAILSPGAL

SEQ ID NO: 852 - protein, 9 aa, Hepatitis C Virus
LLPRRGPRL

SEQ ID NO: 853 - protein, 11 aa, Hepatitis C Virus
LLSPRGSRPSW

SEQ ID NO: 854 - protein, 11 aa, Hepatitis C Virus
LLWRQEMGGNI

SEQ ID NO: 855 - protein, 8 aa, Hepatitis C Virus
LTCGFADL

SEQ ID NO: 856 - protein, 9 aa, Hepatitis C Virus
LTCGFADLM

SEQ ID NO: 857 - protein, 11 aa, Hepatitis C Virus
LTCGFADLMGY

SEQ ID NO: 858 - protein, 8 aa, Hepatitis C Virus
LTHIDAHF

SEQ ID NO: 859 - protein, 9 aa, Hepatitis C Virus
LTHIDAHFL

SEQ ID NO: 860 - protein, 11 aa, Hepatitis C Virus
LTSMLTDPSHI

SEQ ID NO: 861 - protein, 9 aa, Hepatitis C Virus
LTTSCGNTL

SEQ ID NO: 862 - protein, 8 aa, Hepatitis C Virus
LVDILAGY

SEQ ID NO: 863 - protein, 9 aa, Hepatitis C Virus
LVGGVLAAL

SEQ ID NO: 864 - protein, 11 aa, Hepatitis C Virus
LVLNPSVAATL

SEQ ID NO: 865 - protein, 8 aa, Hepatitis C Virus
LVNLLPAI

SEQ ID NO: 866 - protein, 9 aa, Hepatitis C Virus
LVNLLPAIL

SEQ ID NO: 867 - protein, 9 aa, Hepatitis C Virus
LVTRHADVI

SEQ ID NO: 868 - protein, 10 aa, Hepatitis C Virus
LVVGVVCAAI

SEQ ID NO: 869 - protein, 11 aa, Hepatitis C Virus
LVVGVVCAAIL

SEQ ID NO: 870 - protein, 8 aa, Hepatitis C Virus
LWARMILM

SEQ ID NO: 871 - protein, 11 aa, Hepatitis C Virus
LWARMILMTHF

SEQ ID NO: 872 - protein, 10 aa, Hepatitis C Virus
LWRQEMGGNI

SEQ ID NO: 873 - protein, 11 aa, Hepatitis C Virus
LYLVTRHADVI

SEQ ID NO: 874 - protein, 8 aa, Hepatitis C Virus
MILMTHFF

SEQ ID NO: 875 - protein, 8 aa, Hepatitis C Virus
MLTDPSHI

SEQ ID NO: 876 - protein, 8 aa, Hepatitis C Virus
MWNFISGI

SEQ ID NO: 877 - protein, 10 aa, Hepatitis C Virus
MWNFISGIQY

SEQ ID NO: 878 - protein, 11 aa, Hepatitis C Virus
MWNFISGIQYL

SEQ ID NO: 879 - protein, 10 aa, Hepatitis C Virus
MYVGGVEHRL

SEQ ID NO: 880 - protein, 8 aa, Hepatitis C Virus
NFISGIQY

SEQ ID NO: 881 - protein, 9 aa, Hepatitis C Virus
NFISGIQYL

SEQ ID NO: 882 - protein, 11 aa, Hepatitis C Virus
NILGGWVAAQL

SEQ ID NO: 883 - protein, 9 aa, Hepatitis C Virus
NIRTGVRTI

SEQ ID NO: 884 - protein, 8 aa, Hepatitis C Virus
NIVDVQYL

SEQ ID NO: 885 - protein, 9 aa, Hepatitis C Virus
NIVDVQYLY

SEQ ID NO: 886 - protein, 9 aa, Hepatitis C Virus
NLGKVIDTL

SEQ ID NO: 887 - protein, 8 aa, Hepatitis C Virus
NLLWRQEM

SEQ ID NO: 888 - protein, 9 aa, Hepatitis C Virus
NLPGCSFSI

SEQ ID NO: 889 - protein, 10 aa, Hepatitis C Virus
NLPGCSFSIF

SEQ ID NO: 890 - protein, 11 aa, Hepatitis C Virus
NLPGCSFSIFL

SEQ ID NO: 891 - protein, 10 aa, Hepatitis C Virus
NTCVTQTVDF

SEQ ID NO: 892 - protein, 8 aa, Hepatitis C Virus
NTNGSWHI

SEQ ID NO: 893 - protein, 11 aa, Hepatitis C Virus
NTNRRPQDVKF

SEQ ID NO: 894 - protein, 9 aa, Hepatitis C Virus
NVDQDLVGW

SEQ ID NO: 895 - protein, 8 aa, Hepatitis C Virus
NWFGCTWM

SEQ ID NO: 896 - protein, 10 aa, Hepatitis C Virus
PITYSTYGKF

SEQ ID NO: 897 - protein, 11 aa, Hepatitis C Virus
PITYSTYGKFL

SEQ ID NO: 898 - protein, 11 aa, Hepatitis C Virus
PLEGEPGDPDL

SEQ ID NO: 899 - protein, 9 aa, Hepatitis C Virus
PLGGAARAL

SEQ ID NO: 900 - protein, 11 aa, Hepatitis C Virus
PMGFSYDTRCF

SEQ ID NO: 901 - protein, 11 aa, Hepatitis C Virus
PTDPRRRSRNL

SEQ ID NO: 902 - protein, 9 aa, Hepatitis C Virus
PTLHGPTPL

SEQ ID NO: 903 - protein, 10 aa, Hepatitis C Virus
PTLHGPTPLL

SEQ ID NO: 904 - protein, 11 aa, Hepatitis C Virus
PTLHGPTPLLY

SEQ ID NO: 905 - protein, 8 aa, Hepatitis C Virus
PTLWARMI

SEQ ID NO: 906 - protein, 9 aa, Hepatitis C Virus
PTLWARMIL

SEQ ID NO: 907 - protein, 10 aa, Hepatitis C Virus
PTLWARMILM

SEQ ID NO: 908 - protein, 8 aa, Hepatitis C Virus
PTPLLYRL

SEQ ID NO: 909 - protein, 9 aa, Hepatitis C Virus
PVCQDHLEF

SEQ ID NO: 910 - protein, 10 aa, Hepatitis C Virus
PVCQDHLEFW

SEQ ID NO: 911 - protein, 9 aa, Hepatitis C Virus
PVNSWLGNI

SEQ ID NO: 912 - protein, 10 aa, Hepatitis C Virus
PVNSWLGNII

SEQ ID NO: 913 - protein, 11 aa, Hepatitis C Virus
PVNSWLGNIIM

SEQ ID NO: 914 - protein, 8 aa, Hepatitis C Virus
PVVHGCPL

SEQ ID NO: 915 - protein, 9 aa, Hepatitis C Virus
QFKQKALGL

SEQ ID NO: 916 - protein, 10 aa, Hepatitis C Virus
QFKQKALGLL

SEQ ID NO: 917 - protein, 8 aa, Hepatitis C Virus
QIVGGVYL

SEQ ID NO: 918 - protein, 9 aa, Hepatitis C Virus
QIVGGVYLL

SEQ ID NO: 919 - protein, 11 aa, Hepatitis C Virus
QTVDFSLDPTF

SEQ ID NO: 920 - protein, 9 aa, Hepatitis C Virus
QWMNRLIAF

SEQ ID NO: 921 - protein, 9 aa, Hepatitis C Virus
QYLAGLSTL

SEQ ID NO: 922 - protein, 10 aa, Hepatitis C Virus
QYSPGQRVEF

SEQ ID NO: 923 - protein, 11 aa, Hepatitis C Virus
QYSPGQRVEFL

SEQ ID NO: 924 - protein, 8 aa, Hepatitis C Virus
RLHGLSAF

SEQ ID NO: 925 - protein, 10 aa, Hepatitis C Virus
RLHGLSAFSL

SEQ ID NO: 926 - protein, 8 aa, Hepatitis C Virus
RLIVFPDL

SEQ ID NO: 927 - protein, 9 aa, Hepatitis C Virus
RLLAPITAY

SEQ ID NO: 928 - protein, 8 aa, Hepatitis C Virus
RMAWDMMM

SEQ ID NO: 929 - protein, 10 aa, Hepatitis C Virus
RMAWDMMMNW

SEQ ID NO: 930 - protein, 8 aa, Hepatitis C Virus
RMILMTHF

SEQ ID NO: 931 - protein, 9 aa, Hepatitis C Virus
RMILMTHFF

SEQ ID NO: 932 - protein, 11 aa, Hepatitis C Virus
RMYVGGVEHRL

SEQ ID NO: 933 - protein, 8 aa, Hepatitis C Virus
RVCEKMAL

SEQ ID NO: 934 - protein, 9 aa, Hepatitis C Virus
RVCEKMALY

SEQ ID NO: 935 - protein, 9 aa, Hepatitis C Virus
RVLEDGVNY

SEQ ID NO: 936 - protein, 9 aa, Hepatitis C Virus
SFSIFLLAL

SEQ ID NO: 937 - protein, 10 aa, Hepatitis C Virus
SFSIFLLALL

SEQ ID NO: 938 - protein, 8 aa, Hepatitis C Virus
SIFLLALL

SEQ ID NO: 939 - protein, 11 aa, Hepatitis C Virus
SIFLLALLSCL

SEQ ID NO: 940 - protein, 8 aa, Hepatitis C Virus
SLDPTFTI

SEQ ID NO: 941 - protein, 10 aa, Hepatitis C Virus
SLHSYSPGEI

SEQ ID NO: 942 - protein, 9 aa, Hepatitis C Virus
SMLTDPSHI

SEQ ID NO: 943 - protein, 8 aa, Hepatitis C Virus
STKVPAAY

SEQ ID NO: 944 - protein, 9 aa, Hepatitis C Virus
STLPGNPAI

SEQ ID NO: 945 - protein, 10 aa, Hepatitis C Virus
STWVLVGGVL

SEQ ID NO: 946 - protein, 8 aa, Hepatitis C Virus
SVAATLGF

SEQ ID NO: 947 - protein, 11 aa, Hepatitis C Virus
SVAATLGFGAY

SEQ ID NO: 948 - protein, 9 aa, Hepatitis C Virus
SWDQMWKCL

SEQ ID NO: 949 - protein, 8 aa, Hepatitis C Virus
SWLGNIIM

SEQ ID NO: 950 - protein, 11 aa, Hepatitis C Virus
SYLKGSSGGPL

SEQ ID NO: 951 - protein, 9 aa, Hepatitis C Virus
TIMAKNEVF

SEQ ID NO: 952 - protein, 8 aa, Hepatitis C Virus
TLGFGAYM

SEQ ID NO: 953 - protein, 8 aa, Hepatitis C Virus
TLHGPTPL

SEQ ID NO: 954 - protein, 9 aa, Hepatitis C Virus
TLHGPTPLL

SEQ ID NO: 955 - protein, 10 aa, Hepatitis C Virus
TLHGPTPLLY

SEQ ID NO: 956 - protein, 10 aa, Hepatitis C Virus
TLLFNILGGW

SEQ ID NO: 957 - protein, 9 aa, Hepatitis C Virus
TLPALSTGL

SEQ ID NO: 958 - protein, 10 aa, Hepatitis C Virus
TLPALSTGLI

SEQ ID NO: 959 - protein, 8 aa, Hepatitis C Virus
TLPGNPAI

SEQ ID NO: 960 - protein, 9 aa, Hepatitis C Virus
TLTCGFADL

SEQ ID NO: 961 - protein, 10 aa, Hepatitis C Virus
TLTCGFADLM

SEQ ID NO: 962 - protein, 8 aa, Hepatitis C Virus
TLWARMIL

SEQ ID NO: 963 - protein, 9 aa, Hepatitis C Virus
TLWARMILM

SEQ ID NO: 964 - protein, 10 aa, Hepatitis C Virus
TTIMAKNEVF

SEQ ID NO: 965 - protein, 10 aa, Hepatitis C Virus
TTLPALSTGL

SEQ ID NO: 966 - protein, 11 aa, Hepatitis C Virus
TTLPALSTGLI

SEQ ID NO: 967 - protein, 8 aa, Hepatitis C Virus
TTMRSPVF

SEQ ID NO: 968 - protein, 8 aa, Hepatitis C Virus
TTSCGNTL

SEQ ID NO: 969 - protein, 10 aa, Hepatitis C Virus
TVDFSLDPTF

SEQ ID NO: 970 - protein, 8 aa, Hepatitis C Virus
TWMNSTGF

SEQ ID NO: 971 - protein, 9 aa, Hepatitis C Virus
TWVLVGGVL

SEQ ID NO: 972 - protein, 8 aa, Hepatitis C Virus
TYSTYGKF

SEQ ID NO: 973 - protein, 9 aa, Hepatitis C Virus
TYSTYGKFL

SEQ ID NO: 974 - protein, 8 aa, Hepatitis C Virus
VFTGLTHI

SEQ ID NO: 975 - protein, 9 aa, Hepatitis C Virus
VIDTLTCGF

SEQ ID NO: 976 - protein, 8 aa, Hepatitis C Virus
VLAALAAY

SEQ ID NO: 977 - protein, 10 aa, Hepatitis C Virus
VLAALAAYCL

SEQ ID NO: 978 - protein, 8 aa, Hepatitis C Virus
VLEDGVNY

SEQ ID NO: 979 - protein, 10 aa, Hepatitis C Virus
VLNPSVAATL

SEQ ID NO: 980 - protein, 10 aa, Hepatitis C Virus
VLTTSCGNTL

SEQ ID NO: 981 - protein, 9 aa, Hepatitis C Virus
VLVDILAGY

SEQ ID NO: 982 - protein, 10 aa, Hepatitis C Virus
VLVGGVLAAL

SEQ ID NO: 983 - protein, 8 aa, Hepatitis C Virus
VMGSSYGF

SEQ ID NO: 984 - protein, 10 aa, Hepatitis C Virus
VMGSSYGFQY

SEQ ID NO: 985 - protein, 9 aa, Hepatitis C Virus
VTQTVDFSL

SEQ ID NO: 986 - protein, 8 aa, Hepatitis C Virus
VTRHADVI

SEQ ID NO: 987 - protein, 8 aa, Hepatitis C Virus
VVATDALM

SEQ ID NO: 988 - protein, 9 aa, Hepatitis C Virus
VVGVVCAAI

SEQ ID NO: 989 - protein, 10 aa, Hepatitis C Virus
VVGVVCAAIL

SEQ ID NO: 990 - protein, 8 aa, Hepatitis C Virus
VVTSTWVL

SEQ ID NO: 991 - protein, 11 aa, Hepatitis C Virus
VYLLPRRGPRL

SEQ ID NO: 992 - protein, 8 aa, Hepatitis C Virus
WMNRLIAF

SEQ ID NO: 993 - protein, 8 aa, Hepatitis C Virus
WVLVGGVL

SEQ ID NO: 994 - protein, 11 aa, Hepatitis C Virus
WVLVGGVLAAL

SEQ ID NO: 995 - protein, 9 aa, Hepatitis C Virus
YIPLVGAPL

SEQ ID NO: 996 - protein, 8 aa, Hepatitis C Virus
YLAGLSTL

SEQ ID NO: 997 - protein, 10 aa, Hepatitis C Virus
YLKGSSGGPL

SEQ ID NO: 998 - protein, 11 aa, Hepatitis C Virus
YLKGSSGGPLL

SEQ ID NO: 999 - protein, 10 aa, Hepatitis C Virus
YLLPRRGPRL

SEQ ID NO: 1000 - protein, 10 aa, Hepatitis C Virus
YLVTRHADVI

SEQ ID NO: 1001 - protein, 8 aa, Hepatitis C Virus
YTNVDQDL

SEQ ID NO: 1002 - protein, 11 aa, Hepatitis C Virus
YTNVDQDLVGW

SEQ ID NO: 1003 - protein, 10 aa, Hepatitis C Virus
YVGDLCGSVF

SEQ ID NO: 1004 - protein, 11 aa, Hepatitis C Virus
YVGDLCGSVFL

SEQ ID NO: 1005 - protein, 9 aa, Hepatitis C Virus
YVGGVEHRL

SEQ ID NO: 1006 - protein, 10 aa, Hepatitis C Virus
YYRGLDVSVI

SEQ ID NO: 1007 - protein, 9 aa, Hepatitis C Virus
APPPSWDQM

SEQ ID NO: 1008 - protein, 10 aa, Hepatitis C Virus
APPPSWDQMW

SEQ ID NO: 1009 - protein, 11 aa, Hepatitis C Virus
APTGSGKSTKV

SEQ ID NO: 1010 - protein, 8 aa, Hepatitis C Virus
APTLWARM

SEQ ID NO: 1011 - protein, 9 aa, Hepatitis C Virus
APTLWARMI

SEQ ID NO: 1012 - protein, 10 aa, Hepatitis C Virus
APTLWARMIL

SEQ ID NO: 1013 - protein, 11 aa, Hepatitis C Virus
APTLWARMILM

SEQ ID NO: 1014 - protein, 9 aa, Hepatitis C Virus
DPDLSDGSW

SEQ ID NO: 1015 - protein, 9 aa, Hepatitis C Virus
DPRRRSRNL

SEQ ID NO: 1016 - protein, 8 aa, Hepatitis C Virus
FPDLGVRV

SEQ ID NO: 1017 - protein, 8 aa, Hepatitis C Virus
FPGGGQIV

SEQ ID NO: 1018 - protein, 11 aa, Hepatitis C Virus
FPGGGQIVGGV

SEQ ID NO: 1019 - protein, 9 aa, Hepatitis C Virus
GPGEGAVQW

SEQ ID NO: 1020 - protein, 10 aa, Hepatitis C Virus
GPGEGAVQWM

SEQ ID NO: 1021 - protein, 8 aa, Hepatitis C Virus
GPRLGVRA

SEQ ID NO: 1022 - protein, 9 aa, Hepatitis C Virus
GPTPLLYRL

SEQ ID NO: 1023 - protein, 11 aa, Hepatitis C Virus
GPTPLLYRLGA

SEQ ID NO: 1024 - protein, 11 aa, Hepatitis C Virus
GPVYCFTPSPV

SEQ ID NO: 1025 - protein, 8 aa, Hepatitis C Virus
IPFYGKAI

SEQ ID NO: 1026 - protein, 8 aa, Hepatitis C Virus
IPLVGAPL

SEQ ID NO: 1027 - protein, 8 aa, Hepatitis C Virus
KPARLIVF

SEQ ID NO: 1028 - protein, 11 aa, Hepatitis C Virus
KPARLIVFPDL

SEQ ID NO: 1029 - protein, 10 aa, Hepatitis C Virus
KPTLHGPTPL

SEQ ID NO: 1030 - protein, 11 aa, Hepatitis C Virus
KPTLHGPTPLL

SEQ ID NO: 1031 - protein, 9 aa, Hepatitis C Virus
LPAILSPGA

SEQ ID NO: 1032 - protein, 10 aa, Hepatitis C Virus
LPAILSPGAL

SEQ ID NO: 1033 - protein, 11 aa, Hepatitis C Virus
LPAILSPGALV

SEQ ID NO: 1034 - protein, 8 aa, Hepatitis C Virus
LPALSTGL

SEQ ID NO: 1035 - protein, 9 aa, Hepatitis C Virus
LPALSTGLI

SEQ ID NO: 1036 - protein, 11 aa, Hepatitis C Virus
LPALSTGLIHL

SEQ ID NO: 1037 - protein, 9 aa, Hepatitis C Virus
LPCEPEPDV

SEQ ID NO: 1038 - protein, 8 aa, Hepatitis C Virus
LPGCSFSI

SEQ ID NO: 1039 - protein, 9 aa, Hepatitis C Virus
LPGCSFSIF

SEQ ID NO: 1040 - protein, 10 aa, Hepatitis C Virus
LPGCSFSIFL

SEQ ID NO: 1041 - protein, 11 aa, Hepatitis C Virus
LPGCSFSIFLL

SEQ ID NO: 1042 - protein, 8 aa, Hepatitis C Virus
LPRRGPRL

SEQ ID NO: 1043 - protein, 10 aa, Hepatitis C Virus
LPRRGPRLGV

SEQ ID NO: 1044 - protein, 8 aa, Hepatitis C Virus
LPVCQDHL

SEQ ID NO: 1045 - protein, 10 aa, Hepatitis C Virus
LPVCQDHLEF

SEQ ID NO: 1046 - protein, 11 aa, Hepatitis C Virus
LPVCQDHLEFW

SEQ ID NO: 1047 - protein, 8 aa, Hepatitis C Virus
LPYIEQGM

SEQ ID NO: 1048 - protein, 8 aa, Hepatitis C Virus
NPSVAATL

SEQ ID NO: 1049 - protein, 10 aa, Hepatitis C Virus
NPSVAATLGF

SEQ ID NO: 1050 - protein, 8 aa, Hepatitis C Virus
PPPSWDQM

SEQ ID NO: 1051 - protein, 9 aa, Hepatitis C Virus
PPPSWDQMW

SEQ ID NO: 1052 - protein, 8 aa, Hepatitis C Virus
PPSWDQMW

SEQ ID NO: 1053 - protein, 11 aa, Hepatitis C Virus
PPSWDQMWKCL

SEQ ID NO: 1054 - protein, 9 aa, Hepatitis C Virus
PPVVHGCPL

SEQ ID NO: 1055 - protein, 10 aa, Hepatitis C Virus
QPEKGGRKPA

SEQ ID NO: 1056 - protein, 8 aa, Hepatitis C Virus
QPEYDLEL

SEQ ID NO: 1057 - protein, 9 aa, Hepatitis C Virus
QPEYDLELI

SEQ ID NO: 1058 - protein, 8 aa, Hepatitis C Virus
QPGYPWPL

SEQ ID NO: 1059 - protein, 9 aa, Hepatitis C Virus
QPGYPWPLY

SEQ ID NO: 1060 - protein, 9 aa, Hepatitis C Virus
QPRGRRQPI

SEQ ID NO: 1061 - protein, 8 aa, Hepatitis C Virus
RPDYNPPL

SEQ ID NO: 1062 - protein, 9 aa, Hepatitis C Virus
SPGALVVGV

SEQ ID NO: 1063 - protein, 10 aa, Hepatitis C Virus
SPGALVVGVV

SEQ ID NO: 1064 - protein, 8 aa, Hepatitis C Virus
SPGEINRV

SEQ ID NO: 1065 - protein, 9 aa, Hepatitis C Virus
SPGEINRVA

SEQ ID NO: 1066 - protein, 8 aa, Hepatitis C Virus
SPGQRVEF

SEQ ID NO: 1067 - protein, 9 aa, Hepatitis C Virus
SPGQRVEFL

SEQ ID NO: 1068 - protein, 9 aa, Hepatitis C Virus
SPRGSRPSW

SEQ ID NO: 1069 - protein, 11 aa, Hepatitis C Virus
SPTHYVPESDA

SEQ ID NO: 1070 - protein, 8 aa, Hepatitis C Virus
TPCSGSWL

SEQ ID NO: 1071 - protein, 10 aa, Hepatitis C Virus
TPCTCGSSDL

SEQ ID NO: 1072 - protein, 11 aa, Hepatitis C Virus
TPCTCGSSDLY

SEQ ID NO: 1073 - protein, 8 aa, Hepatitis C Virus
TPGCVPCV

SEQ ID NO: 1074 - protein, 11 aa, Hepatitis C Virus
TPGLPVCQDHL

SEQ ID NO: 1075 - protein, 9 aa, Hepatitis C Virus
TPLLYRLGA

SEQ ID NO: 1076 - protein, 10 aa, Hepatitis C Virus
TPLLYRLGAV

SEQ ID NO: 1077 - protein, 10 aa, Hepatitis C Virus
TPVNSWLGNI

SEQ ID NO: 1078 - protein, 11 aa, Hepatitis C Virus
TPVNSWLGNII

SEQ ID NO: 1079 - protein, 8 aa, Hepatitis C Virus
VPESDAAA

SEQ ID NO: 1080 - protein, 10 aa, Hepatitis C Virus
VPESDAAARV

SEQ ID NO: 1081 - protein, 8 aa, Hepatitis C Virus
WPLLLLLL

SEQ ID NO: 1082 - protein, 8 aa, Hepatitis C Virus
YPYRLWHY

SEQ ID NO: 1083 - protein, 8 aa, Hepatitis C Virus
AKHMWNFI

SEQ ID NO: 1084 - protein, 8 aa, Hepatitis C Virus
AKNEVFCV

SEQ ID NO: 1085 - protein, 8 aa, Hepatitis C Virus
ARALAHGV

SEQ ID NO: 1086 - protein, 8 aa, Hepatitis C Virus
DRSELSPL

SEQ ID NO: 1087 - protein, 8 aa, Hepatitis C Virus
EKGGRKPA

SEQ ID NO: 1088 - protein, 8 aa, Hepatitis C Virus
EKMALYDV

SEQ ID NO: 1089 - protein, 8 aa, Hepatitis C Virus
FKQKALGL

SEQ ID NO: 1090 - protein, 8 aa, Hepatitis C Virus
GHRMAWDM

SEQ ID NO: 1091 - protein, 8 aa, Hepatitis C Virus
GKSTKVPA

SEQ ID NO: 1092 - protein, 8 aa, Hepatitis C Virus
GRKPARLI

SEQ ID NO: 1093 - protein, 8 aa, Hepatitis C Virus
HRMAWDMM

SEQ ID NO: 1094 - protein, 8 aa, Hepatitis C Virus
IKGGRHLI

SEQ ID NO: 1095 - protein, 8 aa, Hepatitis C Virus
IRTGVRTI

SEQ ID NO: 1096 - protein, 8 aa, Hepatitis C Virus
KKCDELAA

SEQ ID NO: 1097 - protein, 8 aa, Hepatitis C Virus
KKKCDELA

SEQ ID NO: 1098 - protein, 8 aa, Hepatitis C Virus
LHGPTPLL

SEQ ID NO: 1099 - protein, 8 aa, Hepatitis C Virus
LHQNIVDV

SEQ ID NO: 1100 - protein, 8 aa, Hepatitis C Virus
LRDLAVAV

SEQ ID NO: 1101 - protein, 8 aa, Hepatitis C Virus
NHVSPTHY

SEQ ID NO: 1102 - protein, 8 aa, Hepatitis C Virus
PRGRRQPI

SEQ ID NO: 1103 - protein, 8 aa, Hepatitis C Virus
PRGSRPSW

SEQ ID NO: 1104 - protein, 8 aa, Hepatitis C Virus
PRRRSRNL

SEQ ID NO: 1105 - protein, 8 aa, Hepatitis C Virus
RHADVIPV

SEQ ID NO: 1106 - protein, 8 aa, Hepatitis C Virus
RHTPVNSW

SEQ ID NO: 1107 - protein, 8 aa, Hepatitis C Virus
RKLGVPPL

SEQ ID NO: 1108 - protein, 8 aa, Hepatitis C Virus
RKPARLIV

SEQ ID NO: 1109 - protein, 8 aa, Hepatitis C Virus
RRCRASGV

SEQ ID NO: 1110 - protein, 8 aa, Hepatitis C Virus
RRGPRLGV

SEQ ID NO: 1111 - protein, 8 aa, Hepatitis C Virus
RRPQDVKF

SEQ ID NO: 1112 - protein, 8 aa, Hepatitis C Virus
SKKKCDEL

SEQ ID NO: 1113 - protein, 8 aa, Hepatitis C Virus
SRNLGKVI

SEQ ID NO: 1114 - protein, 8 aa, Hepatitis C Virus
THIDAHFL

SEQ ID NO: 1115 - protein, 8 aa, Hepatitis C Virus
TKLKLTPI

SEQ ID NO: 1116 - protein, 8 aa, Hepatitis C Virus
TKVPAAYA

SEQ ID NO: 1117 - protein, 8 aa, Hepatitis C Virus
TRCFDSTV

SEQ ID NO: 1118 - protein, 8 aa, Hepatitis C Virus
TRGVAKAV

SEQ ID NO: 1119 - protein, 8 aa, Hepatitis C Virus
VRVCEKMA

SEQ ID NO: 1120 - protein, 8 aa, Hepatitis C Virus
VRVLEDGV

SEQ ID NO: 1121 - protein, 8 aa, Hepatitis C Virus
YRGLDVSV

SEQ ID NO: 1122 - protein, 9 aa, Hepatitis C Virus
ARHTPVNSW

SEQ ID NO: 1123 - protein, 9 aa, Hepatitis C Virus
ARLIVFPDL

SEQ ID NO: 1124 - protein, 9 aa, Hepatitis C Virus
ARLVVLATA

SEQ ID NO: 1125 - protein, 9 aa, Hepatitis C Virus
ARMILMTHF

SEQ ID NO: 1126 - protein, 9 aa, Hepatitis C Virus
ARPDYNPPL

SEQ ID NO: 1127 - protein, 9 aa, Hepatitis C Virus
DRSELSPLL

SEQ ID NO: 1128 - protein, 9 aa, Hepatitis C Virus
EKMALYDVV

SEQ ID NO: 1129 - protein, 9 aa, Hepatitis C Virus
FKQKALGLL

SEQ ID NO: 1130 - protein, 9 aa, Hepatitis C Virus
GHRMAWDMM

SEQ ID NO: 1131 - protein, 9 aa, Hepatitis C Virus
GKSTKVPAA

SEQ ID NO: 1132 - protein, 9 aa, Hepatitis C Virus
GRKPARLIV

SEQ ID NO: 1133 - protein, 9 aa, Hepatitis C Virus
HRMAWDMMM

SEQ ID NO: 1134 - protein, 9 aa, Hepatitis C Virus
IKGGRHLIF

SEQ ID NO: 1135 - protein, 9 aa, Hepatitis C Virus
KKKCDELAA

SEQ ID NO: 1136 - protein, 9 aa, Hepatitis C Virus
LHGLSAFSL

SEQ ID NO: 1137 - protein, 9 aa, Hepatitis C Virus
LHGPTPLLY

SEQ ID NO: 1138 - protein, 9 aa, Hepatitis C Virus
LHSYSPGEI

SEQ ID NO: 1139 - protein, 9 aa, Hepatitis C Virus
LKGSSGGPL

SEQ ID NO: 1140 - protein, 9 aa, Hepatitis C Virus
LRKLGVPPL

SEQ ID NO: 1141 - protein, 9 aa, Hepatitis C Virus
NHVSPTHYV

SEQ ID NO: 1142 - protein, 9 aa, Hepatitis C Virus
NRRPQDVKF

SEQ ID NO: 1143 - protein, 9 aa, Hepatitis C Virus
PRRGPRLGV

SEQ ID NO: 1144 - protein, 9 aa, Hepatitis C Virus
RHTPVNSWL

SEQ ID NO: 1145 - protein, 9 aa, Hepatitis C Virus
RHVGPGEGA

SEQ ID NO: 1146 - protein, 9 aa, Hepatitis C Virus
RKPARLIVF

SEQ ID NO: 1147 - protein, 9 aa, Hepatitis C Virus
RRCRASGVL

SEQ ID NO: 1148 - protein, 9 aa, Hepatitis C Virus
RRSRNLGKV

SEQ ID NO: 1149 - protein, 9 aa, Hepatitis C Virus
SKKKCDELA

SEQ ID NO: 1150 - protein, 9 aa, Hepatitis C Virus
THYVPESDA

SEQ ID NO: 1151 - protein, 9 aa, Hepatitis C Virus
TKVPAAYAA

SEQ ID NO: 1152 - protein, 9 aa, Hepatitis C Virus
TRHADVIPV

SEQ ID NO: 1153 - protein, 9 aa, Hepatitis C Virus
TRVESENKV

SEQ ID NO: 1154 - protein, 9 aa, Hepatitis C Virus
VKFPGGGQI

SEQ ID NO: 1155 - protein, 9 aa, Hepatitis C Virus
VRVCEKMAL

SEQ ID NO: 1156 - protein, 9 aa, Hepatitis C Virus
WRLLAPITA

SEQ ID NO: 1157 - protein, 9 aa, Hepatitis C Virus
WRQEMGGNI

SEQ ID NO: 1158 - protein, 9 aa, Hepatitis C Virus
YRGLDVSVI

SEQ ID NO: 1159 - protein, 9 aa, Hepatitis C Virus
YRRCRASGV

SEQ ID NO: 1160 - protein, 10 aa, Hepatitis C Virus
ARALAHGVRV

SEQ ID NO: 1161 - protein, 10 aa, Hepatitis C Virus
ARAQAPPPSW

SEQ ID NO: 1162 - protein, 10 aa, Hepatitis C Virus
ARHTPVNSWL

SEQ ID NO: 1163 - protein, 10 aa, Hepatitis C Virus
ARMILMTHFF

SEQ ID NO: 1164 - protein, 10 aa, Hepatitis C Virus
CHSKKKCDEL

SEQ ID NO: 1165 - protein, 10 aa, Hepatitis C Virus
DRDRSELSPL

SEQ ID NO: 1166 - protein, 10 aa, Hepatitis C Virus
DRSELSPLLL

SEQ ID NO: 1167 - protein, 10 aa, Hepatitis C Virus
EKGGRKPARL

SEQ ID NO: 1168 - protein, 10 aa, Hepatitis C Virus
FRAAVCTRGV

SEQ ID NO: 1169 - protein, 10 aa, Hepatitis C Virus
GHRMAWDMMM

SEQ ID NO: 1170 - protein, 10 aa, Hepatitis C Virus
GKSTKVPAAY

SEQ ID NO: 1171 - protein, 10 aa, Hepatitis C Virus
GRKPARLIVF

SEQ ID NO: 1172 - protein, 10 aa, Hepatitis C Virus
KHMWNFISGI

SEQ ID NO: 1173 - protein, 10 aa, Hepatitis C Virus
KKCDELAAKL

SEQ ID NO: 1174 - protein, 10 aa, Hepatitis C Virus
LHQNIVDVQY

SEQ ID NO: 1175 - protein, 10 aa, Hepatitis C Virus
LKGSSGGPLL

SEQ ID NO: 1176 - protein, 10 aa, Hepatitis C Virus
QKALGLLQTA

SEQ ID NO: 1177 - protein, 10 aa, Hepatitis C Virus
RHVGPGEGAV

SEQ ID NO: 1178 - protein, 10 aa, Hepatitis C Virus
RRGPRLGVRA

SEQ ID NO: 1179 - protein, 10 aa, Hepatitis C Virus
RRHVGPGEGA

SEQ ID NO: 1180 - protein, 10 aa, Hepatitis C Virus
RRRSRNLGKV

SEQ ID NO: 1181 - protein, 10 aa, Hepatitis C Virus
RRSRNLGKVI

SEQ ID NO: 1182 - protein, 10 aa, Hepatitis C Virus
SKFGYGAKDV

SEQ ID NO: 1183 - protein, 10 aa, Hepatitis C Virus
SKKKCDELAA

SEQ ID NO: 1184 - protein, 10 aa, Hepatitis C Virus
THYVPESDAA

SEQ ID NO: 1185 - protein, 10 aa, Hepatitis C Virus
TRGVAKAVDF

SEQ ID NO: 1186 - protein, 10 aa, Hepatitis C Virus
TRVESENKVV

SEQ ID NO: 1187 - protein, 10 aa, Hepatitis C Virus
VKFPGGGQIV

SEQ ID NO: 1188 - protein, 10 aa, Hepatitis C Virus
VRVCEKMALY

SEQ ID NO: 1189 - protein, 10 aa, Hepatitis C Virus
VRVLEDGVNY

SEQ ID NO: 1190 - protein, 10 aa, Hepatitis C Virus
WRLLAPITAY

SEQ ID NO: 1191 - protein, 10 aa, Hepatitis C Virus
YKVLVLNPSV

SEQ ID NO: 1192 - protein, 10 aa, Hepatitis C Virus
YRRCRASGVL

SEQ ID NO: 1193 - protein, 11 aa, Hepatitis C Virus
AHGVRVLEDGV

SEQ ID NO: 1194 - protein, 11 aa, Hepatitis C Virus
AKHMWNFISGI

SEQ ID NO: 1195 - protein, 11 aa, Hepatitis C Virus
ARALAHGVRVL

SEQ ID NO: 1196 - protein, 11 aa, Hepatitis C Virus
ARLIVFPDLGV

SEQ ID NO: 1197 - protein, 11 aa, Hepatitis C Virus
CHSKKKCDELA

SEQ ID NO: 1198 - protein, 11 aa, Hepatitis C Virus
DRDRSELSPLL

SEQ ID NO: 1199 - protein, 11 aa, Hepatitis C Virus
EKGGRKPARLI

SEQ ID NO: 1200 - protein, 11 aa, Hepatitis C Virus
FRAAVCTRGVA

SEQ ID NO: 1201 - protein, 11 aa, Hepatitis C Virus
GKSTKVPAAYA

SEQ ID NO: 1202 - protein, 11 aa, Hepatitis C Virus
GKVIDTLTCGF

SEQ ID NO: 1203 - protein, 11 aa, Hepatitis C Virus
HRMAWDMMMNW

SEQ ID NO: 1204 - protein, 11 aa, Hepatitis C Virus
KKKCDELAAKL

SEQ ID NO: 1205 - protein, 11 aa, Hepatitis C Virus
KRNTNRRPQDV

SEQ ID NO: 1206 - protein, 11 aa, Hepatitis C Virus
LHGPTPLLYRL

SEQ ID NO: 1207 - protein, 11 aa, Hepatitis C Virus
LHQNIVDVQYL

SEQ ID NO: 1208 - protein, 11 aa, Hepatitis C Virus
LKPTLHGPTPL

SEQ ID NO: 1209 - protein, 11 aa, Hepatitis C Virus
LRRHVGPGEGA

SEQ ID NO: 1210 - protein, 11 aa, Hepatitis C Virus
PRRGPRLGVRA

SEQ ID NO: 1211 - protein, 11 aa, Hepatitis C Virus
PRRRSRNLGKV

SEQ ID NO: 1212 - protein, 11 aa, Hepatitis C Virus
RRHVGPGEGAV

SEQ ID NO: 1213 - protein, 11 aa, Hepatitis C Virus
RRRSRNLGKVI

SEQ ID NO: 1214 - protein, 11 aa, Hepatitis C Virus
SRGNHVSPTHY

SEQ ID NO: 1215 - protein, 11 aa, Hepatitis C Virus
SRNLGKVIDTL

SEQ ID NO: 1216 - protein, 11 aa, Hepatitis C Virus
THYVPESDAAA

SEQ ID NO: 1217 - protein, 11 aa, Hepatitis C Virus
VRVLEDGVNYA

SEQ ID NO: 1218 - protein, 11 aa, Hepatitis C Virus
YKVLVLNPSVA

SEQ ID NO: 1219 - protein, 8 aa, Hepatitis C Virus
AAILRRHV

SEQ ID NO: 1220 - protein, 8 aa, Hepatitis C Virus
AALAAYCL

SEQ ID NO: 1221 - protein, 8 aa, Hepatitis C Virus
AAQGYKVL

SEQ ID NO: 1222 - protein, 8 aa, Hepatitis C Virus
AATLGFGA

SEQ ID NO: 1223 - protein, 8 aa, Hepatitis C Virus
AAVCTRGV

SEQ ID NO: 1224 - protein, 8 aa, Hepatitis C Virus
ASLMAFTA

SEQ ID NO: 1225 - protein, 8 aa, Hepatitis C Virus
ASSSASQL

SEQ ID NO: 1226 - protein, 8 aa, Hepatitis C Virus
ATLGFGAY

SEQ ID NO: 1227 - protein, 8 aa, Hepatitis C Virus
CSFSIFLL

SEQ ID NO: 1228 - protein, 8 aa, Hepatitis C Virus
CSGGAYDI

SEQ ID NO: 1229 - protein, 8 aa, Hepatitis C Virus
CSSNVSVA

SEQ ID NO: 1230 - protein, 8 aa, Hepatitis C Virus
CTCGSSDL

SEQ ID NO: 1231 - protein, 8 aa, Hepatitis C Virus
CTRGVAKA

SEQ ID NO: 1232 - protein, 8 aa, Hepatitis C Virus
DTAACGDI

SEQ ID NO: 1233 - protein, 8 aa, Hepatitis C Virus
DTLTCGFA

SEQ ID NO: 1234 - protein, 8 aa, Hepatitis C Virus
EAALENLV

SEQ ID NO: 1235 - protein, 8 aa, Hepatitis C Virus
EAMTRYSA

SEQ ID NO: 1236 - protein, 8 aa, Hepatitis C Virus
ESDAAARV

SEQ ID NO: 1237 - protein, 8 aa, Hepatitis C Virus
ETAGARLV

SEQ ID NO: 1238 - protein, 8 aa, Hepatitis C Virus
ETTMRSPV

SEQ ID NO: 1239 - protein, 8 aa, Hepatitis C Virus
FADLMGYI

SEQ ID NO: 1240 - protein, 8 aa, Hepatitis C Virus
FASRGNHV

SEQ ID NO: 1241 - protein, 8 aa, Hepatitis C Virus
FSIFLLAL

SEQ ID NO: 1242 - protein, 8 aa, Hepatitis C Virus
FSYDTRCF

SEQ ID NO: 1243 - protein, 8 aa, Hepatitis C Virus
FTEAMTRY

SEQ ID NO: 1244 - protein, 8 aa, Hepatitis C Virus
FTPSPVVV

SEQ ID NO: 1245 - protein, 8 aa, Hepatitis C Virus
GAGVAGAL

SEQ ID NO: 1246 - protein, 8 aa, Hepatitis C Virus
GAHWGVLA

SEQ ID NO: 1247 - protein, 8 aa, Hepatitis C Virus
GALVVGVV

SEQ ID NO: 1248 - protein, 8 aa, Hepatitis C Virus
GARLVVLA

SEQ ID NO: 1249 - protein, 8 aa, Hepatitis C Virus
GSGKSTKV

SEQ ID NO: 1250 - protein, 8 aa, Hepatitis C Virus
GSSDLYLV

SEQ ID NO: 1251 - protein, 8 aa, Hepatitis C Virus
GSSGGPLL

SEQ ID NO: 1252 - protein, 8 aa, Hepatitis C Virus
GSSYGFQY

SEQ ID NO: 1253 - protein, 8 aa, Hepatitis C Virus
GTFPINAY

SEQ ID NO: 1254 - protein, 8 aa, Hepatitis C Virus
HSYSPGEI

SEQ ID NO: 1255 - protein, 8 aa, Hepatitis C Virus
HTPVNSWL

SEQ ID NO: 1256 - protein, 8 aa, Hepatitis C Virus
ISGIQYLA

SEQ ID NO: 1257 - protein, 8 aa, Hepatitis C Virus
ITSCSSNV

SEQ ID NO: 1258 - protein, 8 aa, Hepatitis C Virus
ITWGADTA

SEQ ID NO: 1259 - protein, 8 aa, Hepatitis C Virus
KSTKVPAA

SEQ ID NO: 1260 - protein, 8 aa, Hepatitis C Virus
LAGYGAGV

SEQ ID NO: 1261 - protein, 8 aa, Hepatitis C Virus
LAHGVRVL

SEQ ID NO: 1262 - protein, 8 aa, Hepatitis C Virus
LAVAVEPV

SEQ ID NO: 1263 - protein, 8 aa, Hepatitis C Virus
LSAPSLKA

SEQ ID NO: 1264 - protein, 8 aa, Hepatitis C Virus
LSPGALVV

SEQ ID NO: 1265 - protein, 8 aa, Hepatitis C Virus
LSTGLIHL

SEQ ID NO: 1266 - protein, 8 aa, Hepatitis C Virus
LTCGFADL

SEQ ID NO: 1267 - protein, 8 aa, Hepatitis C Virus
LTHIDAHF

SEQ ID NO: 1268 - protein, 8 aa, Hepatitis C Virus
MSADLEVV

SEQ ID NO: 1269 - protein, 8 aa, Hepatitis C Virus
NSWLGNII

SEQ ID NO: 1270 - protein, 8 aa, Hepatitis C Virus
NTCVTQTV

SEQ ID NO: 1271 - protein, 8 aa, Hepatitis C Virus
NTNGSWHI

SEQ ID NO: 1272 - protein, 8 aa, Hepatitis C Virus
PAILSPGA

SEQ ID NO: 1273 - protein, 8 aa, Hepatitis C Virus
PALSTGLI

SEQ ID NO: 1274 - protein, 8 aa, Hepatitis C Virus
PTLWARMI

SEQ ID NO: 1275 - protein, 8 aa, Hepatitis C Virus
PTPLLYRL

SEQ ID NO: 1276 - protein, 8 aa, Hepatitis C Virus
QATVCARA

SEQ ID NO: 1277 - protein, 8 aa, Hepatitis C Virus
RARPRWFM

SEQ ID NO: 1278 - protein, 8 aa, Hepatitis C Virus
RSELSPLL

SEQ ID NO: 1279 - protein, 8 aa, Hepatitis C Virus
RSRNLGKV

SEQ ID NO: 1280 - protein, 8 aa, Hepatitis C Virus
SAFSLHSY

SEQ ID NO: 1281 - protein, 8 aa, Hepatitis C Virus
SSASQLSA

SEQ ID NO: 1282 - protein, 8 aa, Hepatitis C Virus
STKVPAAY

SEQ ID NO: 1283 - protein, 8 aa, Hepatitis C Virus
STLPGNPA

SEQ ID NO: 1284 - protein, 8 aa, Hepatitis C Virus
STLPQAVM

SEQ ID NO: 1285 - protein, 8 aa, Hepatitis C Virus
STYGKFLA

SEQ ID NO: 1286 - protein, 8 aa, Hepatitis C Virus
TAACGDII

SEQ ID NO: 1287 - protein, 8 aa, Hepatitis C Virus
TAGARLVV

SEQ ID NO: 1288 - protein, 8 aa, Hepatitis C Virus
TTMRSPVF

SEQ ID NO: 1289 - protein, 8 aa, Hepatitis C Virus
TTSCGNTL

SEQ ID NO: 1290 - protein, 8 aa, Hepatitis C Virus
VAGALVAF

SEQ ID NO: 1291 - protein, 8 aa, Hepatitis C Virus
VTRHADVI

SEQ ID NO: 1292 - protein, 8 aa, Hepatitis C Virus
VTSTWVLV

SEQ ID NO: 1293 - protein, 8 aa, Hepatitis C Virus
WAKHMWNF

SEQ ID NO: 1294 - protein, 8 aa, Hepatitis C Virus
WAKVLIVM

SEQ ID NO: 1295 - protein, 8 aa, Hepatitis C Virus
WAQPGYPW

SEQ ID NO: 1296 - protein, 8 aa, Hepatitis C Virus
YAAQGYKV

SEQ ID NO: 1297 - protein, 8 aa, Hepatitis C Virus
YSIEPLDL

SEQ ID NO: 1298 - protein, 8 aa, Hepatitis C Virus
YSTYGKFL

SEQ ID NO: 1299 - protein, 8 aa, Hepatitis C Virus
YTNVDQDL

SEQ ID NO: 1300 - protein, 9 aa, Hepatitis C Virus
AAKLQDCTM

SEQ ID NO: 1301 - protein, 9 aa, Hepatitis C Virus
AAQGYKVLV

SEQ ID NO: 1302 - protein, 9 aa, Hepatitis C Virus
AARALAHGV

SEQ ID NO: 1303 - protein, 9 aa, Hepatitis C Virus
AATLGFGAY

SEQ ID NO: 1304 - protein, 9 aa, Hepatitis C Virus
AAVCTRGVA

SEQ ID NO: 1305 - protein, 9 aa, Hepatitis C Virus
ASQLSAPSL

SEQ ID NO: 1306 - protein, 9 aa, Hepatitis C Virus
ATLGFGAYM

SEQ ID NO: 1307 - protein, 9 aa, Hepatitis C Virus
ATVCARAQA

SEQ ID NO: 1308 - protein, 9 aa, Hepatitis C Virus
CAAILRRHV

SEQ ID NO: 1309 - protein, 9 aa, Hepatitis C Virus
CAWYELTPA

SEQ ID NO: 1310 - protein, 9 aa, Hepatitis C Virus
CSFSIFLLA

SEQ ID NO: 1311 - protein, 9 aa, Hepatitis C Virus
CSGGAYDII

SEQ ID NO: 1312 - protein, 9 aa, Hepatitis C Virus
CTCGSSDLY

SEQ ID NO: 1313 - protein, 9 aa, Hepatitis C Virus
CTRGVAKAV

SEQ ID NO: 1314 - protein, 9 aa, Hepatitis C Virus
CTWMNSTGF

SEQ ID NO: 1315 - protein, 9 aa, Hepatitis C Virus
DAGCAWYEL

SEQ ID NO: 1316 - protein, 9 aa, Hepatitis C Virus
DTAACGDII

SEQ ID NO: 1317 - protein, 9 aa, Hepatitis C Virus
DTRCFDSTV

SEQ ID NO: 1318 - protein, 9 aa, Hepatitis C Virus
ETAGARLVV

SEQ ID NO: 1319 - protein, 9 aa, Hepatitis C Virus
ETTMRSPVF

SEQ ID NO: 1320 - protein, 9 aa, Hepatitis C Virus
FSIFLLALL

SEQ ID NO: 1321 - protein, 9 aa, Hepatitis C Virus
FSLDPTFTI

SEQ ID NO: 1322 - protein, 9 aa, Hepatitis C Virus
FTGLTHIDA

SEQ ID NO: 1323 - protein, 9 aa, Hepatitis C Virus
GAGVAGALV

SEQ ID NO: 1324 - protein, 9 aa, Hepatitis C Virus
GALVAFKIM

SEQ ID NO: 1325 - protein, 9 aa, Hepatitis C Virus
GALVAFKVM

SEQ ID NO: 1326 - protein, 9 aa, Hepatitis C Virus
GAVQWMNRL

SEQ ID NO: 1327 - protein, 9 aa, Hepatitis C Virus
HSKKKCDEL

SEQ ID NO: 1328 - protein, 9 aa, Hepatitis C Virus
HTPGCVPCV

SEQ ID NO: 1329 - protein, 9 aa, Hepatitis C Virus
ITWGADTAA

SEQ ID NO: 1330 - protein, 9 aa, Hepatitis C Virus
ITYSTYGKF

SEQ ID NO: 1331 - protein, 9 aa, Hepatitis C Virus
KALGLLQTA

SEQ ID NO: 1332 - protein, 9 aa, Hepatitis C Virus
KSTKVPAAY

SEQ ID NO: 1333 - protein, 9 aa, Hepatitis C Virus
LAALAAYCL

SEQ ID NO: 1334 - protein, 9 aa, Hepatitis C Virus
LAEQFKQKA

SEQ ID NO: 1335 - protein, 9 aa, Hepatitis C Virus
LAGLAYYSM

SEQ ID NO: 1336 - protein, 9 aa, Hepatitis C Virus
LAGYGAGVA

SEQ ID NO: 1337 - protein, 9 aa, Hepatitis C Virus
LSAFSLHSY

SEQ ID NO: 1338 - protein, 9 aa, Hepatitis C Virus
LSTLPGNPA

SEQ ID NO: 1339 - protein, 9 aa, Hepatitis C Virus
LTCGFADLM

SEQ ID NO: 1340 - protein, 9 aa, Hepatitis C Virus
LTDPSHITA

SEQ ID NO: 1341 - protein, 9 aa, Hepatitis C Virus
LTGRDKNQV

SEQ ID NO: 1342 - protein, 9 aa, Hepatitis C Virus
LTHIDAHFL

SEQ ID NO: 1343 - protein, 9 aa, Hepatitis C Virus
LTTSCGNTL

SEQ ID NO: 1344 - protein, 9 aa, Hepatitis C Virus
MAKNEVFCV

SEQ ID NO: 1345 - protein, 9 aa, Hepatitis C Virus
MAWDMMMNW

SEQ ID NO: 1346 - protein, 9 aa, Hepatitis C Virus
NAVAYYRGL

SEQ ID NO: 1347 - protein, 9 aa, Hepatitis C Virus
NSLLRHHNM

SEQ ID NO: 1348 - protein, 9 aa, Hepatitis C Virus
NSWLGNIIM

SEQ ID NO: 1349 - protein, 9 aa, Hepatitis C Virus
NTNRRPQDV

SEQ ID NO: 1350 - protein, 9 aa, Hepatitis C Virus
PAILSPGAL

SEQ ID NO: 1351 - protein, 9 aa, Hepatitis C Virus
PSVAATLGF

SEQ ID NO: 1352 - protein, 9 aa, Hepatitis C Virus
PTLHGPTPL

SEQ ID NO: 1353 - protein, 9 aa, Hepatitis C Virus
PTLWARMIL

SEQ ID NO: 1354 - protein, 9 aa, Hepatitis C Virus
QAETAGARL

SEQ ID NO: 1355 - protein, 9 aa, Hepatitis C Virus
RAAVCTRGV

SEQ ID NO: 1356 - protein, 9 aa, Hepatitis C Virus
RALAHGVRV

SEQ ID NO: 1357 - protein, 9 aa, Hepatitis C Virus
RAQAPPPSW

SEQ ID NO: 1358 - protein, 9 aa, Hepatitis C Virus
RAYAMDREM

SEQ ID NO: 1359 - protein, 9 aa, Hepatitis C Virus
RSELSPLLL

SEQ ID NO: 1360 - protein, 9 aa, Hepatitis C Virus
RSRNLGKVI

SEQ ID NO: 1361 - protein, 9 aa, Hepatitis C Virus
SSSASQLSA

SEQ ID NO: 1362 - protein, 9 aa, Hepatitis C Virus
STKVPAAYA

SEQ ID NO: 1363 - protein, 9 aa, Hepatitis C Virus
STLPGNPAI

SEQ ID NO: 1364 - protein, 9 aa, Hepatitis C Virus
STWVLVGGV

SEQ ID NO: 1365 - protein, 9 aa, Hepatitis C Virus
TAGARLVVL

SEQ ID NO: 1366 - protein, 9 aa, Hepatitis C Virus
TSCSSNVSV

SEQ ID NO: 1367 - protein, 9 aa, Hepatitis C Virus
TTIMAKNEV

SEQ ID NO: 1368 - protein, 9 aa, Hepatitis C Virus
VAATLGFGA

SEQ ID NO: 1369 - protein, 9 aa, Hepatitis C Virus
VAGGHYVQM

SEQ ID NO: 1370 - protein, 9 aa, Hepatitis C Virus
VAYQATVCA

SEQ ID NO: 1371 - protein, 9 aa, Hepatitis C Virus
VAYYRGLDV

SEQ ID NO: 1372 - protein, 9 aa, Hepatitis C Virus
VSTLPQAVM

SEQ ID NO: 1373 - protein, 9 aa, Hepatitis C Virus
VTQTVDFSL

SEQ ID NO: 1374 - protein, 9 aa, Hepatitis C Virus
WAKHMWNFI

SEQ ID NO: 1375 - protein, 9 aa, Hepatitis C Virus
YAAQGYKVL

SEQ ID NO: 1376 - protein, 9 aa, Hepatitis C Virus
YAPTLWARM

SEQ ID NO: 1377 - protein, 9 aa, Hepatitis C Virus
YSPGEINRV

SEQ ID NO: 1378 - protein, 9 aa, Hepatitis C Virus
YSPGQRVEF

SEQ ID NO: 1379 - protein, 9 aa, Hepatitis C Virus
YSTYGKFLA

SEQ ID NO: 1380 - protein, 9 aa, Hepatitis C Virus
YTNVDQDLV

SEQ ID NO: 1381 - protein, 10 aa, Hepatitis C Virus
AAQGYKVLVL

SEQ ID NO: 1382 - protein, 10 aa, Hepatitis C Virus
AATLGFGAYM

SEQ ID NO: 1383 - protein, 10 aa, Hepatitis C Virus
ASLRVFTEAM

SEQ ID NO: 1384 - protein, 10 aa, Hepatitis C Virus
ASSSASQLSA

SEQ ID NO: 1385 - protein, 10 aa, Hepatitis C Virus
ATGNLPGCSF

SEQ ID NO: 1386 - protein, 10 aa, Hepatitis C Virus
CSFSIFLLAL

SEQ ID NO: 1387 - protein, 10 aa, Hepatitis C Virus
CTCGSSDLYL

SEQ ID NO: 1388 - protein, 10 aa, Hepatitis C Virus
DARVCACLWM

SEQ ID NO: 1389 - protein, 10 aa, Hepatitis C Virus
DSVIDCNTCV

SEQ ID NO: 1390 - protein, 10 aa, Hepatitis C Virus
DTLTCGFADL

SEQ ID NO: 1391 - protein, 10 aa, Hepatitis C Virus
EANLLWRQEM

SEQ ID NO: 1392 - protein, 10 aa, Hepatitis C Virus
ETAGARLVVL

SEQ ID NO: 1393 - protein, 10 aa, Hepatitis C Virus
FADLMGYIPL

SEQ ID NO: 1394 - protein, 10 aa, Hepatitis C Virus
FTEAMTRYSA

SEQ ID NO: 1395 - protein, 10 aa, Hepatitis C Virus
GAARALAHGV

SEQ ID NO: 1396 - protein, 10 aa, Hepatitis C Virus
GADTAACGDI

SEQ ID NO: 1397 - protein, 10 aa, Hepatitis C Virus
GAGVAGALVA

SEQ ID NO: 1398 - protein, 10 aa, Hepatitis C Virus
GALVVGVVCA

SEQ ID NO: 1399 - protein, 10 aa, Hepatitis C Virus
GARLVVLATA

SEQ ID NO: 1400 - protein, 10 aa, Hepatitis C Virus
GAVQWMNRLI

SEQ ID NO: 1401 - protein, 10 aa, Hepatitis C Virus
GSGKSTKVPA

SEQ ID NO: 1402 - protein, 10 aa, Hepatitis C Virus
GTVLDQAETA

SEQ ID NO: 1403 - protein, 10 aa, Hepatitis C Virus
HSKKKCDELA

SEQ ID NO: 1404 - protein, 10 aa, Hepatitis C Virus
IAFASRGNHV

SEQ ID NO: 1405 - protein, 10 aa, Hepatitis C Virus
ISGIQYLAGL

SEQ ID NO: 1406 - protein, 10 aa, Hepatitis C Virus
ITRVESENKV

SEQ ID NO: 1407 - protein, 10 aa, Hepatitis C Virus
ITSCSSNVSV

SEQ ID NO: 1408 - protein, 10 aa, Hepatitis C Virus
ITYSTYGKFL

SEQ ID NO: 1409 - protein, 10 aa, Hepatitis C Virus
KSTKVPAAYA

SEQ ID NO: 1410 - protein, 10 aa, Hepatitis C Virus
LADGGCSGGA

SEQ ID NO: 1411 - protein, 10 aa, Hepatitis C Virus
LAEQFKQKAL

SEQ ID NO: 1412 - protein, 10 aa, Hepatitis C Virus
LALPPRAYAM

SEQ ID NO: 1413 - protein, 10 aa, Hepatitis C Virus
LSPGALVVGV

SEQ ID NO: 1414 - protein, 10 aa, Hepatitis C Virus
LSPRGSRPSW

SEQ ID NO: 1415 - protein, 10 aa, Hepatitis C Virus
LSRARPRWFM

SEQ ID NO: 1416 - protein, 10 aa, Hepatitis C Virus
LSTLPGNPAI

SEQ ID NO: 1417 - protein, 10 aa, Hepatitis C Virus
LTHPITKYIM

SEQ ID NO: 1418 - protein, 10 aa, Hepatitis C Virus
NTCVTQTVDF

SEQ ID NO: 1419 - protein, 10 aa, Hepatitis C Virus
PAILSPGALV

SEQ ID NO: 1420 - protein, 10 aa, Hepatitis C Virus
PALSTGLIHL

SEQ ID NO: 1421 - protein, 10 aa, Hepatitis C Virus
PARLIVFPDL

SEQ ID NO: 1422 - protein, 10 aa, Hepatitis C Virus
PSWDQMWKCL

SEQ ID NO: 1423 - protein, 10 aa, Hepatitis C Virus
PTGSGKSTKV

SEQ ID NO: 1424 - protein, 10 aa, Hepatitis C Virus
PTHYVPESDA

SEQ ID NO: 1425 - protein, 10 aa, Hepatitis C Virus
PTLHGPTPLL

SEQ ID NO: 1426 - protein, 10 aa, Hepatitis C Virus
PTLWARMILM

SEQ ID NO: 1427 - protein, 10 aa, Hepatitis C Virus
PTPLLYRLGA

SEQ ID NO: 1428 - protein, 10 aa, Hepatitis C Virus
QAETAGARLV

SEQ ID NO: 1429 - protein, 10 aa, Hepatitis C Virus
QAPPPSWDQM

SEQ ID NO: 1430 - protein, 10 aa, Hepatitis C Virus
QATVCARAQA

SEQ ID NO: 1431 - protein, 10 aa, Hepatitis C Virus
RAAKLQDCTM

SEQ ID NO: 1432 - protein, 10 aa, Hepatitis C Virus
RAAVCTRGVA

SEQ ID NO: 1433 - protein, 10 aa, Hepatitis C Virus
RALAHGVRVL

SEQ ID NO: 1434 - protein, 10 aa, Hepatitis C Virus
SASQLSAPSL

SEQ ID NO: 1435 - protein, 10 aa, Hepatitis C Virus
STKVPAAYAA

SEQ ID NO: 1436 - protein, 10 aa, Hepatitis C Virus
STWVLVGGVL

SEQ ID NO: 1437 - protein, 10 aa, Hepatitis C Virus
TAGARLVVLA

SEQ ID NO: 1438 - protein, 10 aa, Hepatitis C Virus
TARHTPVNSW

SEQ ID NO: 1439 - protein, 10 aa, Hepatitis C Virus
TSCSSNVSVA

SEQ ID NO: 1440 - protein, 10 aa, Hepatitis C Virus
TSMLTDPSHI

SEQ ID NO: 1441 - protein, 10 aa, Hepatitis C Virus
TSTWVLVGGV

SEQ ID NO: 1442 - protein, 10 aa, Hepatitis C Virus
TTIMAKNEVF

SEQ ID NO: 1443 - protein, 10 aa, Hepatitis C Virus
TTLPALSTGL

SEQ ID NO: 1444 - protein, 10 aa, Hepatitis C Virus
VAATLGFGAY

SEQ ID NO: 1445 - protein, 10 aa, Hepatitis C Virus
VTPGERPSGM

SEQ ID NO: 1446 - protein, 10 aa, Hepatitis C Virus
VTRHADVIPV

SEQ ID NO: 1447 - protein, 10 aa, Hepatitis C Virus
WAQPGYPWPL

SEQ ID NO: 1448 - protein, 10 aa, Hepatitis C Virus
WARMILMTHF

SEQ ID NO: 1449 - protein, 10 aa, Hepatitis C Virus
WARPDYNPPL

SEQ ID NO: 1450 - protein, 10 aa, Hepatitis C Virus
YAAQGYKVLV

SEQ ID NO: 1451 - protein, 10 aa, Hepatitis C Virus
YSPGEINRVA

SEQ ID NO: 1452 - protein, 10 aa, Hepatitis C Virus
YSPGQRVEFL

SEQ ID NO: 1453 - protein, 11 aa, Hepatitis C Virus
AARALAHGVRV

SEQ ID NO: 1454 - protein, 11 aa, Hepatitis C Virus
AASLRVFTEAM

SEQ ID NO: 1455 - protein, 11 aa, Hepatitis C Virus
AAVCTRGVAKA

SEQ ID NO: 1456 - protein, 11 aa, Hepatitis C Virus
ASHLPYIEQGM

SEQ ID NO: 1457 - protein, 11 aa, Hepatitis C Virus
ASQLSAPSLKA

SEQ ID NO: 1458 - protein, 11 aa, Hepatitis C Virus
CARAQAPPPSW

SEQ ID NO: 1459 - protein, 11 aa, Hepatitis C Virus
CSFSIFLLALL

SEQ ID NO: 1460 - protein, 11 aa, Hepatitis C Virus
CTCGSSDLYLV

SEQ ID NO: 1461 - protein, 11 aa, Hepatitis C Virus
CTRGVAKAVDF

SEQ ID NO: 1462 - protein, 11 aa, Hepatitis C Virus
DARVCACLWMM

SEQ ID NO: 1463 - protein, 11 aa, Hepatitis C Virus
DTLTCGFADLM

SEQ ID NO: 1464 - protein, 11 aa, Hepatitis C Virus
ETAGARLVVLA

SEQ ID NO: 1465 - protein, 11 aa, Hepatitis C Virus
FADLMGYIPLV

SEQ ID NO: 1466 - protein, 11 aa, Hepatitis C Virus
FSLHSYSPGEI

SEQ ID NO: 1467 - protein, 11 aa, Hepatitis C Virus
FTGLTHIDAHF

SEQ ID NO: 1468 - protein, 11 aa, Hepatitis C Virus
FTTLPALSTGL

SEQ ID NO: 1469 - protein, 11 aa, Hepatitis C Virus
GADTAACGDII

SEQ ID NO: 1470 - protein, 11 aa, Hepatitis C Virus
GAGVAGALVAF

SEQ ID NO: 1471 - protein, 11 aa, Hepatitis C Virus
GALVVGVVCAA

SEQ ID NO: 1472 - protein, 11 aa, Hepatitis C Virus
GAVQWMNRLIA

SEQ ID NO: 1473 - protein, 11 aa, Hepatitis C Virus
GSGKSTKVPAA

SEQ ID NO: 1474 - protein, 11 aa, Hepatitis C Virus
HSKKKCDELAA

SEQ ID NO: 1475 - protein, 11 aa, Hepatitis C Virus
HSYSPGEINRV

SEQ ID NO: 1476 - protein, 11 aa, Hepatitis C Virus
HTPVNSWLGNI

SEQ ID NO: 1477 - protein, 11 aa, Hepatitis C Virus
ITRVESENKVV

SEQ ID NO: 1478 - protein, 11 aa, Hepatitis C Virus
ITSCSSNVSVA

SEQ ID NO: 1479 - protein, 11 aa, Hepatitis C Virus
ITYSTYGKFLA

SEQ ID NO: 1480 - protein, 11 aa, Hepatitis C Virus
KSTKVPAAYAA

SEQ ID NO: 1481 - protein, 11 aa, Hepatitis C Virus
LADGGCSGGAY

SEQ ID NO: 1482 - protein, 11 aa, Hepatitis C Virus
LAGYGAGVAGA

SEQ ID NO: 1483 - protein, 11 aa, Hepatitis C Virus
LSNSLLRHHNM

SEQ ID NO: 1484 - protein, 11 aa, Hepatitis C Virus
LSPGALVVGVV

SEQ ID NO: 1485 - protein, 11 aa, Hepatitis C Virus
LTCGFADLMGY

SEQ ID NO: 1486 - protein, 11 aa, Hepatitis C Virus
LTSMLTDPSHI

SEQ ID NO: 1487 - protein, 11 aa, Hepatitis C Virus
NAVAYYRGLDV

SEQ ID NO: 1488 - protein, 11 aa, Hepatitis C Virus
NTNRRPQDVKF

SEQ ID NO: 1489 - protein, 11 aa, Hepatitis C Virus
PAILSPGALVV

SEQ ID NO: 1490 - protein, 11 aa, Hepatitis C Virus
PSVAATLGFGA

SEQ ID NO: 1491 - protein, 11 aa, Hepatitis C Virus
PTDPRRRSRNL

SEQ ID NO: 1492 - protein, 11 aa, Hepatitis C Virus
PTHYVPESDAA

SEQ ID NO: 1493 - protein, 11 aa, Hepatitis C Virus
PTLHGPTPLLY

SEQ ID NO: 1494 - protein, 11 aa, Hepatitis C Virus
PTPLLYRLGAV

SEQ ID NO: 1495 - protein, 11 aa, Hepatitis C Virus
QAETAGARLVV

SEQ ID NO: 1496 - protein, 11 aa, Hepatitis C Virus
QAPPPSWDQMW

SEQ ID NO: 1497 - protein, 11 aa, Hepatitis C Virus
QTVDFSLDPTF

SEQ ID NO: 1498 - protein, 11 aa, Hepatitis C Virus
RSQPRGRRQPI

SEQ ID NO: 1499 - protein, 11 aa, Hepatitis C Virus
SADLEVVTSTW

SEQ ID NO: 1500 - protein, 11 aa, Hepatitis C Virus
SSASQLSAPSL

SEQ ID NO: 1501 - protein, 11 aa, Hepatitis C Virus
SSDLYLVTRHA

SEQ ID NO: 1502 - protein, 11 aa, Hepatitis C Virus
STWVLVGGVLA

SEQ ID NO: 1503 - protein, 11 aa, Hepatitis C Virus
TARHTPVNSWL

SEQ ID NO: 1504 - protein, 11 aa, Hepatitis C Virus
TSLTGRDKNQV

SEQ ID NO: 1505 - protein, 11 aa, Hepatitis C Virus
TSTWVLVGGVL

SEQ ID NO: 1506 - protein, 11 aa, Hepatitis C Virus
TTLPALSTGLI

SEQ ID NO: 1507 - protein, 11 aa, Hepatitis C Virus
VAATLGFGAYM

SEQ ID NO: 1508 - protein, 11 aa, Hepatitis C Virus
VAGALVAFKVM

SEQ ID NO: 1509 - protein, 11 aa, Hepatitis C Virus
VAVEPVVFSDM

SEQ ID NO: 1510 - protein, 11 aa, Hepatitis C Virus
VAYQATVCARA

SEQ ID NO: 1511 - protein, 11 aa, Hepatitis C Virus
VAYYRGLDVSV

SEQ ID NO: 1512 - protein, 11 aa, Hepatitis C Virus
VTSTWVLVGGV

SEQ ID NO: 1513 - protein, 11 aa, Hepatitis C Virus
WAQPGYPWPLY

SEQ ID NO: 1514 - protein, 11 aa, Hepatitis C Virus
WARMILMTHFF

SEQ ID NO: 1515 - protein, 11 aa, Hepatitis C Virus
YAAQGYKVLVL

SEQ ID NO: 1516 - protein, 11 aa, Hepatitis C Virus
YATGNLPGCSF

SEQ ID NO: 1517 - protein, 11 aa, Hepatitis C Virus
YTNVDQDLVGW

SEQ ID NO: 1518 - protein, 8 aa, Hepatitis C Virus
AILSPGAL

SEQ ID NO: 1519 - protein, 8 aa, Hepatitis C Virus
ALAHGVRV

SEQ ID NO: 1520 - protein, 8 aa, Hepatitis C Virus
ALGLLQTA

SEQ ID NO: 1521 - protein, 8 aa, Hepatitis C Virus
APTLWARM

SEQ ID NO: 1522 - protein, 8 aa, Hepatitis C Virus
AQAPPPSW

SEQ ID NO: 1523 - protein, 8 aa, Hepatitis C Virus
AQGYKVLV

SEQ ID NO: 1524 - protein, 8 aa, Hepatitis C Virus
AVAYYRGL

SEQ ID NO: 1525 - protein, 8 aa, Hepatitis C Virus
AVCTRGVA

SEQ ID NO: 1526 - protein, 8 aa, Hepatitis C Virus
AVQWMNRL

SEQ ID NO: 1527 - protein, 8 aa, Hepatitis C Virus
CLWMMLLI

SEQ ID NO: 1528 - protein, 8 aa, Hepatitis C Virus
CMSADLEV

SEQ ID NO: 1529 - protein, 8 aa, Hepatitis C Virus
CQDHLEFW

SEQ ID NO: 1530 - protein, 8 aa, Hepatitis C Virus
CVTQTVDF

SEQ ID NO: 1531 - protein, 8 aa, Hepatitis C Virus
DILAGYGA

SEQ ID NO: 1532 - protein, 8 aa, Hepatitis C Virus
DLCGSVFL

SEQ ID NO: 1533 - protein, 8 aa, Hepatitis C Virus
DLMGYIPL

SEQ ID NO: 1534 - protein, 8 aa, Hepatitis C Virus
DLVNLLPA

SEQ ID NO: 1535 - protein, 8 aa, Hepatitis C Virus
DQAETAGA

SEQ ID NO: 1536 - protein, 8 aa, Hepatitis C Virus
EIPFYGKA

SEQ ID NO: 1537 - protein, 8 aa, Hepatitis C Virus
EQFKQKAL

SEQ ID NO: 1538 - protein, 8 aa, Hepatitis C Virus
EVVTSTWV

SEQ ID NO: 1539 - protein, 8 aa, Hepatitis C Virus
FISGIQYL

SEQ ID NO: 1540 - protein, 8 aa, Hepatitis C Virus
FPDLGVRV

SEQ ID NO: 1541 - protein, 8 aa, Hepatitis C Virus
FPGGGQIV

SEQ ID NO: 1542 - protein, 8 aa, Hepatitis C Virus
FQVAHLHA

SEQ ID NO: 1543 - protein, 8 aa, Hepatitis C Virus
GIQYLAGL

SEQ ID NO: 1544 - protein, 8 aa, Hepatitis C Virus
GLRDLAVA

SEQ ID NO: 1545 - protein, 8 aa, Hepatitis C Virus
GPRLGVRA

SEQ ID NO: 1546 - protein, 8 aa, Hepatitis C Virus
GQIVGGVY

SEQ ID NO: 1547 - protein, 8 aa, Hepatitis C Virus
GVAGALVA

SEQ ID NO: 1548 - protein, 8 aa, Hepatitis C Virus
GVAKAVDF

SEQ ID NO: 1549 - protein, 8 aa, Hepatitis C Virus
GVLAALAA

SEQ ID NO: 1550 - protein, 8 aa, Hepatitis C Virus
GVRVCEKM

SEQ ID NO: 1551 - protein, 8 aa, Hepatitis C Virus
GVVCAAIL

SEQ ID NO: 1552 - protein, 8 aa, Hepatitis C Virus
HVGPGEGA

SEQ ID NO: 1553 - protein, 8 aa, Hepatitis C Virus
HVSPTHYV

SEQ ID NO: 1554 - protein, 8 aa, Hepatitis C Virus
ILGGWVAA

SEQ ID NO: 1555 - protein, 8 aa, Hepatitis C Virus
ILGIGTVL

SEQ ID NO: 1556 - protein, 8 aa, Hepatitis C Virus
ILSPGALV

SEQ ID NO: 1557 - protein, 8 aa, Hepatitis C Virus
IMAKNEVF

SEQ ID NO: 1558 - protein, 8 aa, Hepatitis C Virus
IPFYGKAI

SEQ ID NO: 1559 - protein, 8 aa, Hepatitis C Virus
IPLVGAPL

SEQ ID NO: 1560 - protein, 8 aa, Hepatitis C Virus
IVDVQYLY

SEQ ID NO: 1561 - protein, 8 aa, Hepatitis C Virus
IVFPDLGV

SEQ ID NO: 1562 - protein, 8 aa, Hepatitis C Virus
IVGGVYLL

SEQ ID NO: 1563 - protein, 8 aa, Hepatitis C Virus
KMALYDVV

SEQ ID NO: 1564 - protein, 8 aa, Hepatitis C Virus
KPARLIVF

SEQ ID NO: 1565 - protein, 8 aa, Hepatitis C Virus
KQKALGLL

SEQ ID NO: 1566 - protein, 8 aa, Hepatitis C Virus
KVPAAYAA

SEQ ID NO: 1567 - protein, 8 aa, Hepatitis C Virus
LIEANLLW

SEQ ID NO: 1568 - protein, 8 aa, Hepatitis C Virus
LINTNGSW

SEQ ID NO: 1569 - protein, 8 aa, Hepatitis C Virus
LLALLSCL

SEQ ID NO: 1570 - protein, 8 aa, Hepatitis C Virus
LLAPITAY

SEQ ID NO: 1571 - protein, 8 aa, Hepatitis C Virus
LLLADARV

SEQ ID NO: 1572 - protein, 8 aa, Hepatitis C Virus
LLYRLGAV

SEQ ID NO: 1573 - protein, 8 aa, Hepatitis C Virus
LMGYIPLV

SEQ ID NO: 1574 - protein, 8 aa, Hepatitis C Virus
LPALSTGL

SEQ ID NO: 1575 - protein, 8 aa, Hepatitis C Virus
LPGCSFSI

SEQ ID NO: 1576 - protein, 8 aa, Hepatitis C Virus
LPRRGPRL

SEQ ID NO: 1577 - protein, 8 aa, Hepatitis C Virus
LPVCQDHL

SEQ ID NO: 1578 - protein, 8 aa, Hepatitis C Virus
LPYIEQGM

SEQ ID NO: 1579 - protein, 8 aa, Hepatitis C Virus
LQDCTMLV

SEQ ID NO: 1580 - protein, 8 aa, Hepatitis C Virus
LVAYQATV

SEQ ID NO: 1581 - protein, 8 aa, Hepatitis C Virus
LVDILAGY

SEQ ID NO: 1582 - protein, 8 aa, Hepatitis C Virus
LVGGVLAA

SEQ ID NO: 1583 - protein, 8 aa, Hepatitis C Virus
LVLNPSVA

SEQ ID NO: 1584 - protein, 8 aa, Hepatitis C Virus
LVNLLPAI

SEQ ID NO: 1585 - protein, 8 aa, Hepatitis C Virus
LVTRHADV

SEQ ID NO: 1586 - protein, 8 aa, Hepatitis C Virus
LVVGVVCA

SEQ ID NO: 1587 - protein, 8 aa, Hepatitis C Virus
LVVICESA

SEQ ID NO: 1588 - protein, 8 aa, Hepatitis C Virus
MILMTHFF

SEQ ID NO: 1589 - protein, 8 aa, Hepatitis C Virus
MLTDPSHI

SEQ ID NO: 1590 - protein, 8 aa, Hepatitis C Virus
NILGGWVA

SEQ ID NO: 1591 - protein, 8 aa, Hepatitis C Virus
NIVDVQYL

SEQ ID NO: 1592 - protein, 8 aa, Hepatitis C Virus
NLLWRQEM

SEQ ID NO: 1593 - protein, 8 aa, Hepatitis C Virus
NPSVAATL

SEQ ID NO: 1594 - protein, 8 aa, Hepatitis C Virus
PLGGAARA

SEQ ID NO: 1595 - protein, 8 aa, Hepatitis C Virus
PLLYRLGA

SEQ ID NO: 1596 - protein, 8 aa, Hepatitis C Virus
PPPSWDQM

SEQ ID NO: 1597 - protein, 8 aa, Hepatitis C Virus
PPSWDQMW

SEQ ID NO: 1598 - protein, 8 aa, Hepatitis C Virus
PVVHGCPL

SEQ ID NO: 1599 - protein, 8 aa, Hepatitis C Virus
QIVGGVYL

SEQ ID NO: 1600 - protein, 8 aa, Hepatitis C Virus
QLLRIPQA

SEQ ID NO: 1601 - protein, 8 aa, Hepatitis C Virus
QPEYDLEL

SEQ ID NO: 1602 - protein, 8 aa, Hepatitis C Virus
QPGYPWPL

SEQ ID NO: 1603 - protein, 8 aa, Hepatitis C Virus
RLHGLSAF

SEQ ID NO: 1604 - protein, 8 aa, Hepatitis C Virus
RLIVFPDL

SEQ ID NO: 1605 - protein, 8 aa, Hepatitis C Virus
RLLAPITA

SEQ ID NO: 1606 - protein, 8 aa, Hepatitis C Virus
RLVVLATA

SEQ ID NO: 1607 - protein, 8 aa, Hepatitis C Virus
RMAWDMMM

SEQ ID NO: 1608 - protein, 8 aa, Hepatitis C Virus
RMILMTHF

SEQ ID NO: 1609 - protein, 8 aa, Hepatitis C Virus
RPDYNPPL

SEQ ID NO: 1610 - protein, 8 aa, Hepatitis C Virus
RQEMGGNI

SEQ ID NO: 1611 - protein, 8 aa, Hepatitis C Virus
RVCEKMAL

SEQ ID NO: 1612 - protein, 8 aa, Hepatitis C Virus
RVESENKV

SEQ ID NO: 1613 - protein, 8 aa, Hepatitis C Virus
RVGDFHYV

SEQ ID NO: 1614 - protein, 8 aa, Hepatitis C Virus
SIFLLALL

SEQ ID NO: 1615 - protein, 8 aa, Hepatitis C Virus
SLDPTFTI

SEQ ID NO: 1616 - protein, 8 aa, Hepatitis C Virus
SPGEINRV

SEQ ID NO: 1617 - protein, 8 aa, Hepatitis C Virus
SPGQRVEF

SEQ ID NO: 1618 - protein, 8 aa, Hepatitis C Virus
SQLSAPSL

SEQ ID NO: 1619 - protein, 8 aa, Hepatitis C Virus
SVAATLGF

SEQ ID NO: 1620 - protein, 8 aa, Hepatitis C Virus
TIMAKNEV

SEQ ID NO: 1621 - protein, 8 aa, Hepatitis C Virus
TLGFGAYM

SEQ ID NO: 1622 - protein, 8 aa, Hepatitis C Virus
TLHGPTPL

SEQ ID NO: 1623 - protein, 8 aa, Hepatitis C Virus
TLPGNPAI

SEQ ID NO: 1624 - protein, 8 aa, Hepatitis C Virus
TLWARMIL

SEQ ID NO: 1625 - protein, 8 aa, Hepatitis C Virus
TPCSGSWL

SEQ ID NO: 1626 - protein, 8 aa, Hepatitis C Virus
TPGCVPCV

SEQ ID NO: 1627 - protein, 8 aa, Hepatitis C Virus
TQTVDFSL

SEQ ID NO: 1628 - protein, 8 aa, Hepatitis C Virus
TVCARAQA

SEQ ID NO: 1629 - protein, 8 aa, Hepatitis C Virus
VIDCNTCV

SEQ ID NO: 1630 - protein, 8 aa, Hepatitis C Virus
VLAALAAY

SEQ ID NO: 1631 - protein, 8 aa, Hepatitis C Virus
VLCECYDA

SEQ ID NO: 1632 - protein, 8 aa, Hepatitis C Virus
VLDQAETA

SEQ ID NO: 1633 - protein, 8 aa, Hepatitis C Virus
VLEDGVNY

SEQ ID NO: 1634 - protein, 8 aa, Hepatitis C Virus
VLNPSVAA

SEQ ID NO: 1635 - protein, 8 aa, Hepatitis C Virus
VLVGGVLA

SEQ ID NO: 1636 - protein, 8 aa, Hepatitis C Virus
VLVLNPSV

SEQ ID NO: 1637 - protein, 8 aa, Hepatitis C Virus
VMGSSYGF

SEQ ID NO: 1638 - protein, 8 aa, Hepatitis C Virus
VPESDAAA

SEQ ID NO: 1639 - protein, 8 aa, Hepatitis C Virus
VQWMNRLI

SEQ ID NO: 1640 - protein, 8 aa, Hepatitis C Virus
VVATDALM

SEQ ID NO: 1641 - protein, 8 aa, Hepatitis C Virus
VVGVVCAA

SEQ ID NO: 1642 - protein, 8 aa, Hepatitis C Virus
VVTSTWVL

SEQ ID NO: 1643 - protein, 8 aa, Hepatitis C Virus
WMNRLIAF

SEQ ID NO: 1644 - protein, 8 aa, Hepatitis C Virus
WPLLLLLL

SEQ ID NO: 1645 - protein, 8 aa, Hepatitis C Virus
WVLVGGVL

SEQ ID NO: 1646 - protein, 8 aa, Hepatitis C Virus
YLAGLSTL

SEQ ID NO: 1647 - protein, 8 aa, Hepatitis C Virus
YPYRLWHY

SEQ ID NO: 1648 - protein, 8 aa, Hepatitis C Virus
YVPESDAA

SEQ ID NO: 1649 - protein, 9 aa, Hepatitis C Virus
AILSPGALV

SEQ ID NO: 1650 - protein, 9 aa, Hepatitis C Virus
ALAHGVRVL

SEQ ID NO: 1651 - protein, 9 aa, Hepatitis C Virus
ALSTGLIHL

SEQ ID NO: 1652 - protein, 9 aa, Hepatitis C Virus
ALVVGVVCA

SEQ ID NO: 1653 - protein, 9 aa, Hepatitis C Virus
APPPSWDQM

SEQ ID NO: 1654 - protein, 9 aa, Hepatitis C Virus
APTLWARMI

SEQ ID NO: 1655 - protein, 9 aa, Hepatitis C Virus
AQGYKVLVL

SEQ ID NO: 1656 - protein, 9 aa, Hepatitis C Virus
AQPGYPWPL

SEQ ID NO: 1657 - protein, 9 aa, Hepatitis C Virus
AVQWMNRLI

SEQ ID NO: 1658 - protein, 9 aa, Hepatitis C Virus
CMSADLEVV

SEQ ID NO: 1659 - protein, 9 aa, Hepatitis C Virus
DLCGSVFLV

SEQ ID NO: 1660 - protein, 9 aa, Hepatitis C Virus
DLEVVTSTW

SEQ ID NO: 1661 - protein, 9 aa, Hepatitis C Virus
DLMGYIPLV

SEQ ID NO: 1662 - protein, 9 aa, Hepatitis C Virus
DLVNLLPAI

SEQ ID NO: 1663 - protein, 9 aa, Hepatitis C Virus
DLVVICESA

SEQ ID NO: 1664 - protein, 9 aa, Hepatitis C Virus
DLYLVTRHA

SEQ ID NO: 1665 - protein, 9 aa, Hepatitis C Virus
DPDLSDGSW

SEQ ID NO: 1666 - protein, 9 aa, Hepatitis C Virus
DPRRRSRNL

SEQ ID NO: 1667 - protein, 9 aa, Hepatitis C Virus
EIPFYGKAI

SEQ ID NO: 1668 - protein, 9 aa, Hepatitis C Virus
EMGGNITRV

SEQ ID NO: 1669 - protein, 9 aa, Hepatitis C Virus
EVVTSTWVL

SEQ ID NO: 1670 - protein, 9 aa, Hepatitis C Virus
FISGIQYLA

SEQ ID NO: 1671 - protein, 9 aa, Hepatitis C Virus
FLLALLSCL

SEQ ID NO: 1672 - protein, 9 aa, Hepatitis C Virus
FLLLADARV

SEQ ID NO: 1673 - protein, 9 aa, Hepatitis C Virus
FQYSPGQRV

SEQ ID NO: 1674 - protein, 9 aa, Hepatitis C Virus
GIGTVLDQA

SEQ ID NO: 1675 - protein, 9 aa, Hepatitis C Virus
GLPVCQDHL

SEQ ID NO: 1676 - protein, 9 aa, Hepatitis C Virus
GLRDLAVAV

SEQ ID NO: 1677 - protein, 9 aa, Hepatitis C Virus
GLTHIDAHF

SEQ ID NO: 1678 - protein, 9 aa, Hepatitis C Virus
GPGEGAVQW

SEQ ID NO: 1679 - protein, 9 aa, Hepatitis C Virus
GPTPLLYRL

SEQ ID NO: 1680 - protein, 9 aa, Hepatitis C Virus
GQIVGGVYL

SEQ ID NO: 1681 - protein, 9 aa, Hepatitis C Virus
GVAGALVAF

SEQ ID NO: 1682 - protein, 9 aa, Hepatitis C Virus
GVLAALAAY

SEQ ID NO: 1683 - protein, 9 aa, Hepatitis C Virus
GVNYATGNL

SEQ ID NO: 1684 - protein, 9 aa, Hepatitis C Virus
GVRVCEKMA

SEQ ID NO: 1685 - protein, 9 aa, Hepatitis C Virus
GVRVLEDGV

SEQ ID NO: 1686 - protein, 9 aa, Hepatitis C Virus
HLHQNIVDV

SEQ ID NO: 1687 - protein, 9 aa, Hepatitis C Virus
HLPYIEQGM

SEQ ID NO: 1688 - protein, 9 aa, Hepatitis C Virus
HMWNFISGI

SEQ ID NO: 1689 - protein, 9 aa, Hepatitis C Virus
HQNIVDVQY

SEQ ID NO: 1690 - protein, 9 aa, Hepatitis C Virus
HVGPGEGAV

SEQ ID NO: 1691 - protein, 9 aa, Hepatitis C Virus
ILAGYGAGV

SEQ ID NO: 1692 - protein, 9 aa, Hepatitis C Virus
ILSPGALVV

SEQ ID NO: 1693 - protein, 9 aa, Hepatitis C Virus
KVLVLNPSV

SEQ ID NO: 1694 - protein, 9 aa, Hepatitis C Virus
LITSCSSNV

SEQ ID NO: 1695 - protein, 9 aa, Hepatitis C Virus
LIVFPDLGV

SEQ ID NO: 1696 - protein, 9 aa, Hepatitis C Virus
LLFLLLADA

SEQ ID NO: 1697 - protein, 9 aa, Hepatitis C Virus
LLFNILGGW

SEQ ID NO: 1698 - protein, 9 aa, Hepatitis C Virus
LLPRRGPRL

SEQ ID NO: 1699 - protein, 9 aa, Hepatitis C Virus
LPAILSPGA

SEQ ID NO: 1700 - protein, 9 aa, Hepatitis C Virus
LPALSTGLI

SEQ ID NO: 1701 - protein, 9 aa, Hepatitis C Virus
LPCEPEPDV

SEQ ID NO: 1702 - protein, 9 aa, Hepatitis C Virus
LPGCSFSIF

SEQ ID NO: 1703 - protein, 9 aa, Hepatitis C Virus
LVGGVLAAL

SEQ ID NO: 1704 - protein, 9 aa, Hepatitis C Virus
LVLNPSVAA

SEQ ID NO: 1705 - protein, 9 aa, Hepatitis C Virus
LVNLLPAIL

SEQ ID NO: 1706 - protein, 9 aa, Hepatitis C Virus
LVTRHADVI

SEQ ID NO: 1707 - protein, 9 aa, Hepatitis C Virus
LVVGVVCAA

SEQ ID NO: 1708 - protein, 9 aa, Hepatitis C Virus
NILGGWVAA

SEQ ID NO: 1709 - protein, 9 aa, Hepatitis C Virus
NIRTGVRTI

SEQ ID NO: 1710 - protein, 9 aa, Hepatitis C Virus
NIVDVQYLY

SEQ ID NO: 1711 - protein, 9 aa, Hepatitis C Virus
NLGKVIDTL

SEQ ID NO: 1712 - protein, 9 aa, Hepatitis C Virus
NLPGCSFSI

SEQ ID NO: 1713 - protein, 9 aa, Hepatitis C Virus
NVDQDLVGW

SEQ ID NO: 1714 - protein, 9 aa, Hepatitis C Virus
PLGGAARAL

SEQ ID NO: 1715 - protein, 9 aa, Hepatitis C Virus
PLLYRLGAV

SEQ ID NO: 1716 - protein, 9 aa, Hepatitis C Virus
PPPSWDQMW

SEQ ID NO: 1717 - protein, 9 aa, Hepatitis C Virus
PPVVHGCPL

SEQ ID NO: 1718 - protein, 9 aa, Hepatitis C Virus
PQPEYDLEL

SEQ ID NO: 1719 - protein, 9 aa, Hepatitis C Virus
PVCQDHLEF

SEQ ID NO: 1720 - protein, 9 aa, Hepatitis C Virus
PVNSWLGNI

SEQ ID NO: 1721 - protein, 9 aa, Hepatitis C Virus
QIVGGVYLL

SEQ ID NO: 1722 - protein, 9 aa, Hepatitis C Virus
QLSAPSLKA

SEQ ID NO: 1723 - protein, 9 aa, Hepatitis C Virus
QPEYDLELI

SEQ ID NO: 1724 - protein, 9 aa, Hepatitis C Virus
QPGYPWPLY

SEQ ID NO: 1725 - protein, 9 aa, Hepatitis C Virus
QPRGRRQPI

SEQ ID NO: 1726 - protein, 9 aa, Hepatitis C Virus
RLLAPITAY

SEQ ID NO: 1727 - protein, 9 aa, Hepatitis C Virus
RMILMTHFF

SEQ ID NO: 1728 - protein, 9 aa, Hepatitis C Virus
RVCEKMALY

SEQ ID NO: 1729 - protein, 9 aa, Hepatitis C Virus
RVESENKVV

SEQ ID NO: 1730 - protein, 9 aa, Hepatitis C Virus
RVLEDGVNY

SEQ ID NO: 1731 - protein, 9 aa, Hepatitis C Virus
SMLTDPSHI

SEQ ID NO: 1732 - protein, 9 aa, Hepatitis C Virus
SPGALVVGV

SEQ ID NO: 1733 - protein, 9 aa, Hepatitis C Virus
SPGEINRVA

SEQ ID NO: 1734 - protein, 9 aa, Hepatitis C Virus
SPGQRVEFL

SEQ ID NO: 1735 - protein, 9 aa, Hepatitis C Virus
SPRGSRPSW

SEQ ID NO: 1736 - protein, 9 aa, Hepatitis C Virus
SVIDCNTCV

SEQ ID NO: 1737 - protein, 9 aa, Hepatitis C Virus
TIMAKNEVF

SEQ ID NO: 1738 - protein, 9 aa, Hepatitis C Virus
TLHGPTPLL

SEQ ID NO: 1739 - protein, 9 aa, Hepatitis C Virus
TLPALSTGL

SEQ ID NO: 1740 - protein, 9 aa, Hepatitis C Virus
TLTCGFADL

SEQ ID NO: 1741 - protein, 9 aa, Hepatitis C Virus
TLWARMILM

SEQ ID NO: 1742 - protein, 9 aa, Hepatitis C Virus
TPLLYRLGA

SEQ ID NO: 1743 - protein, 9 aa, Hepatitis C Virus
TVLDQAETA

SEQ ID NO: 1744 - protein, 9 aa, Hepatitis C Virus
VIDTLTCGF

SEQ ID NO: 1745 - protein, 9 aa, Hepatitis C Virus
VLEDGVNYA

SEQ ID NO: 1746 - protein, 9 aa, Hepatitis C Virus
VLVDILAGY

SEQ ID NO: 1747 - protein, 9 aa, Hepatitis C Virus
VLVGGVLAA

SEQ ID NO: 1748 - protein, 9 aa, Hepatitis C Virus
VLVLNPSVA

SEQ ID NO: 1749 - protein, 9 aa, Hepatitis C Virus
VQWMNRLIA

SEQ ID NO: 1750 - protein, 9 aa, Hepatitis C Virus
VVGVVCAAI

SEQ ID NO: 1751 - protein, 9 aa, Hepatitis C Virus
VVTSTWVLV

SEQ ID NO: 1752 - protein, 9 aa, Hepatitis C Virus
WMNRLIAFA

SEQ ID NO: 1753 - protein, 9 aa, Hepatitis C Virus
WVLVGGVLA

SEQ ID NO: 1754 - protein, 9 aa, Hepatitis C Virus
YIPLVGAPL

SEQ ID NO: 1755 - protein, 9 aa, Hepatitis C Virus
YLVAYQATV

SEQ ID NO: 1756 - protein, 9 aa, Hepatitis C Virus
YLVTRHADV

SEQ ID NO: 1757 - protein, 9 aa, Hepatitis C Virus
YQATVCARA

SEQ ID NO: 1758 - protein, 9 aa, Hepatitis C Virus
YVGDLCGSV

SEQ ID NO: 1759 - protein, 9 aa, Hepatitis C Virus
YVGGVEHRL

SEQ ID NO: 1760 - protein, 9 aa, Hepatitis C Virus
YVPESDAAA

SEQ ID NO: 1761 - protein, 10 aa, Hepatitis C Virus
AILSPGALVV

SEQ ID NO: 1762 - protein, 10 aa, Hepatitis C Virus
ALVVGVVCAA

SEQ ID NO: 1763 - protein, 10 aa, Hepatitis C Virus
APPPSWDQMW

SEQ ID NO: 1764 - protein, 10 aa, Hepatitis C Virus
APTLWARMIL

SEQ ID NO: 1765 - protein, 10 aa, Hepatitis C Virus
AQPGYPWPLY

SEQ ID NO: 1766 - protein, 10 aa, Hepatitis C Virus
AVAYYRGLDV

SEQ ID NO: 1767 - protein, 10 aa, Hepatitis C Virus
AVCTRGVAKA

SEQ ID NO: 1768 - protein, 10 aa, Hepatitis C Virus
AVQWMNRLIA

SEQ ID NO: 1769 - protein, 10 aa, Hepatitis C Virus
CLRKLGVPPL

SEQ ID NO: 1770 - protein, 10 aa, Hepatitis C Virus
CVTQTVDFSL

SEQ ID NO: 1771 - protein, 10 aa, Hepatitis C Virus
DILAGYGAGV

SEQ ID NO: 1772 - protein, 10 aa, Hepatitis C Virus
DLEVVTSTWV

SEQ ID NO: 1773 - protein, 10 aa, Hepatitis C Virus
DLGVRVCEKM

SEQ ID NO: 1774 - protein, 10 aa, Hepatitis C Virus
DLSDGSWSTV

SEQ ID NO: 1775 - protein, 10 aa, Hepatitis C Virus
DLVNLLPAIL

SEQ ID NO: 1776 - protein, 10 aa, Hepatitis C Virus
DQAETAGARL

SEQ ID NO: 1777 - protein, 10 aa, Hepatitis C Virus
DVKFPGGGQI

SEQ ID NO: 1778 - protein, 10 aa, Hepatitis C Virus
ELITSCSSNV

SEQ ID NO: 1779 - protein, 10 aa, Hepatitis C Virus
EQFKQKALGL

SEQ ID NO: 1780 - protein, 10 aa, Hepatitis C Virus
EVVTSTWVLV

SEQ ID NO: 1781 - protein, 10 aa, Hepatitis C Virus
GLSAFSLHSY

SEQ ID NO: 1782 - protein, 10 aa, Hepatitis C Virus
GLSTLPGNPA

SEQ ID NO: 1783 - protein, 10 aa, Hepatitis C Virus
GLTHIDAHFL

SEQ ID NO: 1784 - protein, 10 aa, Hepatitis C Virus
GPGEGAVQWM

SEQ ID NO: 1785 - protein, 10 aa, Hepatitis C Virus
GQIVGGVYLL

SEQ ID NO: 1786 - protein, 10 aa, Hepatitis C Virus
GVCWTVYHGA

SEQ ID NO: 1787 - protein, 10 aa, Hepatitis C Virus
GVRVCEKMAL

SEQ ID NO: 1788 - protein, 10 aa, Hepatitis C Virus
HQNIVDVQYL

SEQ ID NO: 1789 - protein, 10 aa, Hepatitis C Virus
ILAGYGAGVA

SEQ ID NO: 1790 - protein, 10 aa, Hepatitis C Virus
ILGGWVAAQL

SEQ ID NO: 1791 - protein, 10 aa, Hepatitis C Virus
IMAKNEVFCV

SEQ ID NO: 1792 - protein, 10 aa, Hepatitis C Virus
IQYLAGLSTL

SEQ ID NO: 1793 - protein, 10 aa, Hepatitis C Virus
IVFPDLGVRV

SEQ ID NO: 1794 - protein, 10 aa, Hepatitis C Virus
KPTLHGPTPL

SEQ ID NO: 1795 - protein, 10 aa, Hepatitis C Virus
KVIDTLTCGF

SEQ ID NO: 1796 - protein, 10 aa, Hepatitis C Virus
KVLVLNPSVA

SEQ ID NO: 1797 - protein, 10 aa, Hepatitis C Virus
LLFNILGGWV

SEQ ID NO: 1798 - protein, 10 aa, Hepatitis C Virus
LLPAILSPGA

SEQ ID NO: 1799 - protein, 10 aa, Hepatitis C Virus
LMGYIPLVGA

SEQ ID NO: 1800 - protein, 10 aa, Hepatitis C Virus
LPAILSPGAL

SEQ ID NO: 1801 - protein, 10 aa, Hepatitis C Virus
LPGCSFSIFL

SEQ ID NO: 1802 - protein, 10 aa, Hepatitis C Virus
LPRRGPRLGV

SEQ ID NO: 1803 - protein, 10 aa, Hepatitis C Virus
LPVCQDHLEF

SEQ ID NO: 1804 - protein, 10 aa, Hepatitis C Virus
LVAYQATVCA

SEQ ID NO: 1805 - protein, 10 aa, Hepatitis C Virus
LVDILAGYGA

SEQ ID NO: 1806 - protein, 10 aa, Hepatitis C Virus
LVGGVLAALA

SEQ ID NO: 1807 - protein, 10 aa, Hepatitis C Virus
LVVGVVCAAI

SEQ ID NO: 1808 - protein, 10 aa, Hepatitis C Virus
MLTDPSHITA

SEQ ID NO: 1809 - protein, 10 aa, Hepatitis C Virus
NLPGCSFSIF

SEQ ID NO: 1810 - protein, 10 aa, Hepatitis C Virus
NPSVAATLGF

SEQ ID NO: 1811 - protein, 10 aa, Hepatitis C Virus
PITYSTYGKF

SEQ ID NO: 1812 - protein, 10 aa, Hepatitis C Virus
PLGGAARALA

SEQ ID NO: 1813 - protein, 10 aa, Hepatitis C Virus
PQPEYDLELI

SEQ ID NO: 1814 - protein, 10 aa, Hepatitis C Virus
PVCQDHLEFW

SEQ ID NO: 1815 - protein, 10 aa, Hepatitis C Virus
PVNSWLGNII

SEQ ID NO: 1816 - protein, 10 aa, Hepatitis C Virus
PVYCFTPSPV

SEQ ID NO: 1817 - protein, 10 aa, Hepatitis C Virus
QLPCEPEPDV

SEQ ID NO: 1818 - protein, 10 aa, Hepatitis C Virus
QPEKGGRKPA

SEQ ID NO: 1819 - protein, 10 aa, Hepatitis C Virus
RLHGLSAFSL

SEQ ID NO: 1820 - protein, 10 aa, Hepatitis C Virus
RLIVFPDLGV

SEQ ID NO: 1821 - protein, 10 aa, Hepatitis C Virus
RMAWDMMMNW

SEQ ID NO: 1822 - protein, 10 aa, Hepatitis C Virus
RVLEDGVNYA

SEQ ID NO: 1823 - protein, 10 aa, Hepatitis C Virus
SLHSYSPGEI

SEQ ID NO: 1824 - protein, 10 aa, Hepatitis C Virus
SLTGRDKNQV

SEQ ID NO: 1825 - protein, 10 aa, Hepatitis C Virus
SPGALVVGVV

SEQ ID NO: 1826 - protein, 10 aa, Hepatitis C Virus
SQLSAPSLKA

SEQ ID NO: 1827 - protein, 10 aa, Hepatitis C Virus
SQPRGRRQPI

SEQ ID NO: 1828 - protein, 10 aa, Hepatitis C Virus
SVAATLGFGA

SEQ ID NO: 1829 - protein, 10 aa, Hepatitis C Virus
TLHGPTPLLY

SEQ ID NO: 1830 - protein, 10 aa, Hepatitis C Virus
TLLFNILGGW

SEQ ID NO: 1831 - protein, 10 aa, Hepatitis C Virus
TLPALSTGLI

SEQ ID NO: 1832 - protein, 10 aa, Hepatitis C Virus
TLTCGFADLM

SEQ ID NO: 1833 - protein, 10 aa, Hepatitis C Virus
TPCTCGSSDL

SEQ ID NO: 1834 - protein, 10 aa, Hepatitis C Virus
TPLLYRLGAV

SEQ ID NO: 1835 - protein, 10 aa, Hepatitis C Virus
TPVNSWLGNI

SEQ ID NO: 1836 - protein, 10 aa, Hepatitis C Virus
TVDFSLDPTF

SEQ ID NO: 1837 - protein, 10 aa, Hepatitis C Virus
VIDTLTCGFA

SEQ ID NO: 1838 - protein, 10 aa, Hepatitis C Virus
VLAALAAYCL

SEQ ID NO: 1839 - protein, 10 aa, Hepatitis C Virus
VLDQAETAGA

SEQ ID NO: 1840 - protein, 10 aa, Hepatitis C Virus
VLNPSVAATL

SEQ ID NO: 1841 - protein, 10 aa, Hepatitis C Virus
VLTTSCGNTL

SEQ ID NO: 1842 - protein, 10 aa, Hepatitis C Virus
VLVGGVLAAL

SEQ ID NO: 1843 - protein, 10 aa, Hepatitis C Virus
VLVLNPSVAA

SEQ ID NO: 1844 - protein, 10 aa, Hepatitis C Virus
VMGSSYGFQY

SEQ ID NO: 1845 - protein, 10 aa, Hepatitis C Virus
VPESDAAARV

SEQ ID NO: 1846 - protein, 10 aa, Hepatitis C Virus
VQWMNRLIAF

SEQ ID NO: 1847 - protein, 10 aa, Hepatitis C Virus
VVGVVCAAIL

SEQ ID NO: 1848 - protein, 10 aa, Hepatitis C Virus
WVLVGGVLAA

SEQ ID NO: 1849 - protein, 10 aa, Hepatitis C Virus
YLKGSSGGPL

SEQ ID NO: 1850 - protein, 10 aa, Hepatitis C Virus
YLLPRRGPRL

SEQ ID NO: 1851 - protein, 10 aa, Hepatitis C Virus
YLVTRHADVI

SEQ ID NO: 1852 - protein, 10 aa, Hepatitis C Virus
YVGDLCGSVF

SEQ ID NO: 1853 - protein, 11 aa, Hepatitis C Virus
ALVVGVVCAAI

SEQ ID NO: 1854 - protein, 11 aa, Hepatitis C Virus
APTGSGKSTKV

SEQ ID NO: 1855 - protein, 11 aa, Hepatitis C Virus
APTLWARMILM

SEQ ID NO: 1856 - protein, 11 aa, Hepatitis C Virus
AQAPPPSWDQM

SEQ ID NO: 1857 - protein, 11 aa, Hepatitis C Virus
AVCTRGVAKAV

SEQ ID NO: 1858 - protein, 11 aa, Hepatitis C Virus
AVQWMNRLIAF

SEQ ID NO: 1859 - protein, 11 aa, Hepatitis C Virus
DILAGYGAGVA

SEQ ID NO: 1860 - protein, 11 aa, Hepatitis C Virus
DLEVVTSTWVL

SEQ ID NO: 1861 - protein, 11 aa, Hepatitis C Virus
DLGVRVCEKMA

SEQ ID NO: 1862 - protein, 11 aa, Hepatitis C Virus
DLMGYIPLVGA

SEQ ID NO: 1863 - protein, 11 aa, Hepatitis C Virus
DLYLVTRHADV

SEQ ID NO: 1864 - protein, 11 aa, Hepatitis C Virus
DQAETAGARLV

SEQ ID NO: 1865 - protein, 11 aa, Hepatitis C Virus
DVKFPGGGQIV

SEQ ID NO: 1866 - protein, 11 aa, Hepatitis C Virus
EQFKQKALGLL

SEQ ID NO: 1867 - protein, 11 aa, Hepatitis C Virus
FISGIQYLAGL

SEQ ID NO: 1868 - protein, 11 aa, Hepatitis C Virus
FLADGGCSGGA

SEQ ID NO: 1869 - protein, 11 aa, Hepatitis C Virus
FPGGGQIVGGV

SEQ ID NO: 1870 - protein, 11 aa, Hepatitis C Virus
FQYSPGQRVEF

SEQ ID NO: 1871 - protein, 11 aa, Hepatitis C Virus
GIQYLAGLSTL

SEQ ID NO: 1872 - protein, 11 aa, Hepatitis C Virus
GLPVCQDHLEF

SEQ ID NO: 1873 - protein, 11 aa, Hepatitis C Virus
GLSTLPGNPAI

SEQ ID NO: 1874 - protein, 11 aa, Hepatitis C Virus
GPTPLLYRLGA

SEQ ID NO: 1875 - protein, 11 aa, Hepatitis C Virus
GPVYCFTPSPV

SEQ ID NO: 1876 - protein, 11 aa, Hepatitis C Virus
GVLAALAAYCL

SEQ ID NO: 1877 - protein, 11 aa, Hepatitis C Virus
GVRVCEKMALY

SEQ ID NO: 1878 - protein, 11 aa, Hepatitis C Virus
GVRVLEDGVNY

SEQ ID NO: 1879 - protein, 11 aa, Hepatitis C Virus
HLHQNIVDVQY

SEQ ID NO: 1880 - protein, 11 aa, Hepatitis C Virus
HMWNFISGIQY

SEQ ID NO: 1881 - protein, 11 aa, Hepatitis C Virus
HQNIVDVQYLY

SEQ ID NO: 1882 - protein, 11 aa, Hepatitis C Virus
HVGPGEGAVQW

SEQ ID NO: 1883 - protein, 11 aa, Hepatitis C Virus
ILGGWVAAQLA

SEQ ID NO: 1884 - protein, 11 aa, Hepatitis C Virus
ILGIGTVLDQA

SEQ ID NO: 1885 - protein, 11 aa, Hepatitis C Virus
ILSPGALVVGV

SEQ ID NO: 1886 - protein, 11 aa, Hepatitis C Virus
KPARLIVFPDL

SEQ ID NO: 1887 - protein, 11 aa, Hepatitis C Virus
KPTLHGPTPLL

SEQ ID NO: 1888 - protein, 11 aa, Hepatitis C Virus
KQKALGLLQTA

SEQ ID NO: 1889 - protein, 11 aa, Hepatitis C Virus
KVIDTLTCGFA

SEQ ID NO: 1890 - protein, 11 aa, Hepatitis C Virus
KVLVLNPSVAA

SEQ ID NO: 1891 - protein, 11 aa, Hepatitis C Virus
LIAFASRGNHV

SEQ ID NO: 1892 - protein, 11 aa, Hepatitis C Virus
LITSCSSNVSV

SEQ ID NO: 1893 - protein, 11 aa, Hepatitis C Virus
LIVFPDLGVRV

SEQ ID NO: 1894 - protein, 11 aa, Hepatitis C Virus
LLFLLLADARV

SEQ ID NO: 1895 - protein, 11 aa, Hepatitis C Virus
LLFNILGGWVA

SEQ ID NO: 1896 - protein, 11 aa, Hepatitis C Virus
LLPAILSPGAL

SEQ ID NO: 1897 - protein, 11 aa, Hepatitis C Virus
LLPRRGPRLGV

SEQ ID NO: 1898 - protein, 11 aa, Hepatitis C Virus
LLSPRGSRPSW

SEQ ID NO: 1899 - protein, 11 aa, Hepatitis C Virus
LLWRQEMGGNI

SEQ ID NO: 1900 - protein, 11 aa, Hepatitis C Virus
LPAILSPGALV

SEQ ID NO: 1901 - protein, 11 aa, Hepatitis C Virus
LPALSTGLIHL

SEQ ID NO: 1902 - protein, 11 aa, Hepatitis C Virus
LPGCSFSIFLL

SEQ ID NO: 1903 - protein, 11 aa, Hepatitis C Virus
LPVCQDHLEFW

SEQ ID NO: 1904 - protein, 11 aa, Hepatitis C Virus
LVGGVLAALAA

SEQ ID NO: 1905 - protein, 11 aa, Hepatitis C Virus
LVLNPSVAATL

SEQ ID NO: 1906 - protein, 11 aa, Hepatitis C Virus
LVTRHADVIPV

SEQ ID NO: 1907 - protein, 11 aa, Hepatitis C Virus
LVVGVVCAAIL

SEQ ID NO: 1908 - protein, 11 aa, Hepatitis C Virus
NILGGWVAAQL

SEQ ID NO: 1909 - protein, 11 aa, Hepatitis C Virus
NITRVESENKV

SEQ ID NO: 1910 - protein, 11 aa, Hepatitis C Virus
NLLPAILSPGA

SEQ ID NO: 1911 - protein, 11 aa, Hepatitis C Virus
NLPGCSFSIFL

SEQ ID NO: 1912 - protein, 11 aa, Hepatitis C Virus
PITYSTYGKFL

SEQ ID NO: 1913 - protein, 11 aa, Hepatitis C Virus
PLEGEPGDPDL

SEQ ID NO: 1914 - protein, 11 aa, Hepatitis C Virus
PMGFSYDTRCF

SEQ ID NO: 1915 - protein, 11 aa, Hepatitis C Virus
PPSWDQMWKCL

SEQ ID NO: 1916 - protein, 11 aa, Hepatitis C Virus
PVNSWLGNIIM

SEQ ID NO: 1917 - protein, 11 aa, Hepatitis C Virus
PVYCFTPSPVV

SEQ ID NO: 1918 - protein, 11 aa, Hepatitis C Virus
RMYVGGVEHRL

SEQ ID NO: 1919 - protein, 11 aa, Hepatitis C Virus
RQEMGGNITRV

SEQ ID NO: 1920 - protein, 11 aa, Hepatitis C Virus
RVCEKMALYDV

SEQ ID NO: 1921 - protein, 11 aa, Hepatitis C Virus
SIFLLALLSCL

SEQ ID NO: 1922 - protein, 11 aa, Hepatitis C Virus
SMLTDPSHITA

SEQ ID NO: 1923 - protein, 11 aa, Hepatitis C Virus
SPTHYVPESDA

SEQ ID NO: 1924 - protein, 11 aa, Hepatitis C Virus
SQLPCEPEPDV

SEQ ID NO: 1925 - protein, 11 aa, Hepatitis C Virus
SVAATLGFGAY

SEQ ID NO: 1926 - protein, 11 aa, Hepatitis C Virus
TLGFGAYMSKA

SEQ ID NO: 1927 - protein, 11 aa, Hepatitis C Virus
TLLFNILGGWV

SEQ ID NO: 1928 - protein, 11 aa, Hepatitis C Virus
TPCTCGSSDLY

SEQ ID NO: 1929 - protein, 11 aa, Hepatitis C Virus
TPGLPVCQDHL

SEQ ID NO: 1930 - protein, 11 aa, Hepatitis C Virus
TPVNSWLGNII

SEQ ID NO: 1931 - protein, 11 aa, Hepatitis C Virus
TVLDQAETAGA

SEQ ID NO: 1932 - protein, 11 aa, Hepatitis C Virus
VLCECYDAGCA

SEQ ID NO: 1933 - protein, 11 aa, Hepatitis C Virus
VLVDILAGYGA

SEQ ID NO: 1934 - protein, 11 aa, Hepatitis C Virus
VLVGGVLAALA

SEQ ID NO: 1935 - protein, 11 aa, Hepatitis C Virus
VQPEKGGRKPA

SEQ ID NO: 1936 - protein, 11 aa, Hepatitis C Virus
VQWMNRLIAFA

SEQ ID NO: 1937 - protein, 11 aa, Hepatitis C Virus
VVCAAILRRHV

SEQ ID NO: 1938 - protein, 11 aa, Hepatitis C Virus
WVLVGGVLAAL

SEQ ID NO: 1939 - protein, 11 aa, Hepatitis C Virus
YLKGSSGGPLL

SEQ ID NO: 1940 - protein, 11 aa, Hepatitis C Virus
YLVAYQATVCA

SEQ ID NO: 1941 - protein, 11 aa, Hepatitis C Virus
YQATVCARAQA

SEQ ID NO: 1942 - protein, 11 aa, Hepatitis C Virus
YVGDLCGSVFL

SEQ ID NO: 1943 - protein, 11 aa, Hepatitis C Virus
YVPESDAAARV

SEQ ID NO: 1944 - protein, 8 aa, Hepatitis C Virus
ASFCGSPY

SEQ ID NO: 1945 - protein, 10 aa, Hepatitis C Virus
DNSVVLSRKY

SEQ ID NO: 1946 - protein, 10 aa, Hepatitis C Virus
FAAPFTQCGY

SEQ ID NO: 1947 - protein, 11 aa, Hepatitis C Virus
GFAAPFTQCGY

SEQ ID NO: 1948 - protein, 8 aa, Hepatitis C Virus
GRETVLEY

SEQ ID NO: 1949 - protein, 9 aa, Hepatitis C Virus
GYSLNFMGY

SEQ ID NO: 1950 - protein, 10 aa, Hepatitis C Virus
HTLWKAGILY

SEQ ID NO: 1951 - protein, 10 aa, Hepatitis C Virus
KQAFTFSPTY

SEQ ID NO: 1952 - protein, 9 aa, Hepatitis C Virus
LLDTASALY

SEQ ID NO: 1953 - protein, 10 aa, Hepatitis C Virus
LSLDVSAAFY

SEQ ID NO: 1954 - protein, 11 aa, Hepatitis C Virus
LTFGRETVLEY

SEQ ID NO: 1955 - protein, 10 aa, Hepatitis C Virus
MMWYWGPSLY

SEQ ID NO: 1956 - protein, 9 aa, Hepatitis C Virus
MSTTDLEAY

SEQ ID NO: 1957 - protein, 9 aa, Hepatitis C Virus
NSVVLSRKY

SEQ ID NO: 1958 - protein, 9 aa, Hepatitis C Virus
PLDKGIKPY

SEQ ID NO: 1959 - protein, 10 aa, Hepatitis C Virus
PLDKGIKPYY

SEQ ID NO: 1960 - protein, 9 aa, Hepatitis C Virus
PTTGRTSLY

SEQ ID NO: 1961 - protein, 9 aa, Hepatitis C Virus
SASFCGSPY

SEQ ID NO: 1962 - protein, 9 aa, Hepatitis C Virus
SLDVSAAFY

SEQ ID NO: 1963 - protein, 8 aa, Hepatitis C Virus
STTDLEAY

SEQ ID NO: 1964 - protein, 8 aa, Hepatitis C Virus
TTGRTSLY

SEQ ID NO: 1965 - protein, 11 aa, Hepatitis C Virus
WLSLDVSAAFY

SEQ ID NO: 1966 - protein, 11 aa, Hepatitis C Virus
WMMWYWGPSLY

SEQ ID NO: 1967 - protein, 8 aa, Hepatitis C Virus
YPALMPLY

SEQ ID NO: 1968 - protein, 8 aa, Hepatitis C Virus
YSLNFMGY

SEQ ID NO: 1969 - protein, 10 aa, Hepatitis C Virus
AACNWTRGER

SEQ ID NO: 1970 - protein, 10 aa, Hepatitis C Virus
AARALAHGVR

SEQ ID NO: 1971 - protein, 8 aa, Hepatitis C Virus
AATLGFGA

SEQ ID NO: 1972 - protein, 9 aa, Hepatitis C Virus
AATLGFGAY

SEQ ID NO: 1973 - protein, 9 aa, Hepatitis C Virus
AAVCTRGVA

SEQ ID NO: 1974 - protein, 10 aa, Hepatitis C Virus
AAVCTRGVAK

SEQ ID NO: 1975 - protein, 11 aa, Hepatitis C Virus
AAVCTRGVAKA

SEQ ID NO: 1976 - protein, 9 aa, Hepatitis C Virus
ACNWTRGER

SEQ ID NO: 1977 - protein, 9 aa, Hepatitis C Virus
ADGGCSGGA

SEQ ID NO: 1978 - protein, 10 aa, Hepatitis C Virus
ADGGCSGGAY

SEQ ID NO: 1979 - protein, 8 aa, Hepatitis C Virus
ADVIPVRR

SEQ ID NO: 1980 - protein, 9 aa, Hepatitis C Virus
ADVIPVRRR

SEQ ID NO: 1981 - protein, 8 aa, Hepatitis C Virus
AFASRGNH

SEQ ID NO: 1982 - protein, 8 aa, Hepatitis C Virus
AGALVAFK

SEQ ID NO: 1983 - protein, 9 aa, Hepatitis C Virus
AGARLVVLA

SEQ ID NO: 1984 - protein, 11 aa, Hepatitis C Virus
AGARLVVLATA

SEQ ID NO: 1985 - protein, 11 aa, Hepatitis C Virus
AGLSTLPGNPA

SEQ ID NO: 1986 - protein, 9 aa, Hepatitis C Virus
AGVAGALVA

SEQ ID NO: 1987 - protein, 10 aa, Hepatitis C Virus
AGVAGALVAF

SEQ ID NO: 1988 - protein, 11 aa, Hepatitis C Virus
AGVAGALVAFK

SEQ ID NO: 1989 - protein, 8 aa, Hepatitis C Virus
AGWLLSPR

SEQ ID NO: 1990 - protein, 11 aa, Hepatitis C Virus
AGWLLSPRGSR

SEQ ID NO: 1991 - protein, 8 aa, Hepatitis C Virus
AGYGAGVA

SEQ ID NO: 1992 - protein, 10 aa, Hepatitis C Virus
AGYGAGVAGA

SEQ ID NO: 1993 - protein, 8 aa, Hepatitis C Virus
ALGLLQTA

SEQ ID NO: 1994 - protein, 8 aa, Hepatitis C Virus
ALSTGLIH

SEQ ID NO: 1995 - protein, 10 aa, Hepatitis C Virus
ALSTGLIHLH

SEQ ID NO: 1996 - protein, 9 aa, Hepatitis C Virus
ALVVGVVCA

SEQ ID NO: 1997 - protein, 10 aa, Hepatitis C Virus
ALVVGVVCAA

SEQ ID NO: 1998 - protein, 8 aa, Hepatitis C Virus
ASLMAFTA

SEQ ID NO: 1999 - protein, 10 aa, Hepatitis C Virus
ASQLSAPSLK

SEQ ID NO: 2000 - protein, 11 aa, Hepatitis C Virus
ASQLSAPSLKA

SEQ ID NO: 2001 - protein, 11 aa, Hepatitis C Virus
ASRGNHVSPTH

SEQ ID NO: 2002 - protein, 10 aa, Hepatitis C Virus
ASSSASQLSA

SEQ ID NO: 2003 - protein, 10 aa, Hepatitis C Virus
ATGNLPGCSF

SEQ ID NO: 2004 - protein, 8 aa, Hepatitis C Virus
ATLGFGAY

SEQ ID NO: 2005 - protein, 11 aa, Hepatitis C Virus
ATLGFGAYMSK

SEQ ID NO: 2006 - protein, 8 aa, Hepatitis C Virus
ATRKTSER

SEQ ID NO: 2007 - protein, 9 aa, Hepatitis C Virus
ATVCARAQA

SEQ ID NO: 2008 - protein, 8 aa, Hepatitis C Virus
AVCTRGVA

SEQ ID NO: 2009 - protein, 9 aa, Hepatitis C Virus
AVCTRGVAK

SEQ ID NO: 2010 - protein, 10 aa, Hepatitis C Virus
AVCTRGVAKA

SEQ ID NO: 2011 - protein, 10 aa, Hepatitis C Virus
AVQWMNRLIA

SEQ ID NO: 2012 - protein, 11 aa, Hepatitis C Virus
AVQWMNRLIAF

SEQ ID NO: 2013 - protein, 8 aa, Hepatitis C Virus
CAAILRRH

SEQ ID NO: 2014 - protein, 9 aa, Hepatitis C Virus
CAWYELTPA

SEQ ID NO: 2015 - protein, 9 aa, Hepatitis C Virus
CGFADLMGY

SEQ ID NO: 2016 - protein, 8 aa, Hepatitis C Virus
CGNTLTCY

SEQ ID NO: 2017 - protein, 11 aa, Hepatitis C Virus
CGSSDLYLVTR

SEQ ID NO: 2018 - protein, 8 aa, Hepatitis C Virus
CGYRRCRA

SEQ ID NO: 2019 - protein, 11 aa, Hepatitis C Virus
CLRKLGVPPLR

SEQ ID NO: 2020 - protein, 9 aa, Hepatitis C Virus
CSFSIFLLA

SEQ ID NO: 2021 - protein, 8 aa, Hepatitis C Virus
CSSNVSVA

SEQ ID NO: 2022 - protein, 9 aa, Hepatitis C Virus
CSSNVSVAH

SEQ ID NO: 2023 - protein, 9 aa, Hepatitis C Virus
CTCGSSDLY

SEQ ID NO: 2024 - protein, 8 aa, Hepatitis C Virus
CTRGVAKA

SEQ ID NO: 2025 - protein, 11 aa, Hepatitis C Virus
CTRGVAKAVDF

SEQ ID NO: 2026 - protein, 9 aa, Hepatitis C Virus
CTWMNSTGF

SEQ ID NO: 2027 - protein, 11 aa, Hepatitis C Virus
CTWMNSTGFTK

SEQ ID NO: 2028 - protein, 9 aa, Hepatitis C Virus
CVQPEKGGR

SEQ ID NO: 2029 - protein, 10 aa, Hepatitis C Virus
CVQPEKGGRK

SEQ ID NO: 2030 - protein, 8 aa, Hepatitis C Virus
CVTQTVDF

SEQ ID NO: 2031 - protein, 9 aa, Hepatitis C Virus
DAHFLSQTK

SEQ ID NO: 2032 - protein, 10 aa, Hepatitis C Virus
DDLVVICESA

SEQ ID NO: 2033 - protein, 8 aa, Hepatitis C Virus
DFSLDPTF

SEQ ID NO: 2034 - protein, 8 aa, Hepatitis C Virus
DGGCSGGA

SEQ ID NO: 2035 - protein, 9 aa, Hepatitis C Virus
DGGCSGGAY

SEQ ID NO: 2036 - protein, 9 aa, Hepatitis C Virus
DIIICDECH

SEQ ID NO: 2037 - protein, 8 aa, Hepatitis C Virus
DILAGYGA

SEQ ID NO: 2038 - protein, 11 aa, Hepatitis C Virus
DILAGYGAGVA

SEQ ID NO: 2039 - protein, 9 aa, Hepatitis C Virus
DLGVRVCEK

SEQ ID NO: 2040 - protein, 11 aa, Hepatitis C Virus
DLGVRVCEKMA

SEQ ID NO: 2041 - protein, 11 aa, Hepatitis C Virus
DLMGYIPLVGA

SEQ ID NO: 2042 - protein, 8 aa, Hepatitis C Virus
DLVNLLPA

SEQ ID NO: 2043 - protein, 9 aa, Hepatitis C Virus
DLVVICESA

SEQ ID NO: 2044 - protein, 8 aa, Hepatitis C Virus
DLYLVTRH

SEQ ID NO: 2045 - protein, 9 aa, Hepatitis C Virus
DLYLVTRHA

SEQ ID NO: 2046 - protein, 8 aa, Hepatitis C Virus
DTLTCGFA

SEQ ID NO: 2047 - protein, 8 aa, Hepatitis C Virus
DVIPVRRR

SEQ ID NO: 2048 - protein, 8 aa, Hepatitis C Virus
EAMTRYSA

SEQ ID NO: 2049 - protein, 8 aa, Hepatitis C Virus
ECYDAGCA

SEQ ID NO: 2050 - protein, 10 aa, Hepatitis C Virus
ECYDAGCAWY

SEQ ID NO: 2051 - protein, 9 aa, Hepatitis C Virus
EDLVNLLPA

SEQ ID NO: 2052 - protein, 9 aa, Hepatitis C Virus
EGAVQWMNR

SEQ ID NO: 2053 - protein, 8 aa, Hepatitis C Virus
EIPFYGKA

SEQ ID NO: 2054 - protein, 8 aa, Hepatitis C Virus
EMGGNITR

SEQ ID NO: 2055 - protein, 11 aa, Hepatitis C Virus
ETAGARLVVLA

SEQ ID NO: 2056 - protein, 9 aa, Hepatitis C Virus
ETTMRSPVF

SEQ ID NO: 2057 - protein, 9 aa, Hepatitis C Virus
EVFCVQPEK

SEQ ID NO: 2058 - protein, 10 aa, Hepatitis C Virus
FCVQPEKGGR

SEQ ID NO: 2059 - protein, 11 aa, Hepatitis C Virus
FCVQPEKGGRK

SEQ ID NO: 2060 - protein, 8 aa, Hepatitis C Virus
FGAYMSKA

SEQ ID NO: 2061 - protein, 9 aa, Hepatitis C Virus
FGAYMSKAH

SEQ ID NO: 2062 - protein, 11 aa, Hepatitis C Virus
FGCTWMNSTGF

SEQ ID NO: 2063 - protein, 9 aa, Hepatitis C Virus
FGYGAKDVR

SEQ ID NO: 2064 - protein, 9 aa, Hepatitis C Virus
FISGIQYLA

SEQ ID NO: 2065 - protein, 11 aa, Hepatitis C Virus
FLADGGCSGGA

SEQ ID NO: 2066 - protein, 8 aa, Hepatitis C Virus
FLLLADAR

SEQ ID NO: 2067 - protein, 8 aa, Hepatitis C Virus
FSYDTRCF

SEQ ID NO: 2068 - protein, 8 aa, Hepatitis C Virus
FTEAMTRY

SEQ ID NO: 2069 - protein, 10 aa, Hepatitis C Virus
FTEAMTRYSA

SEQ ID NO: 2070 - protein, 9 aa, Hepatitis C Virus
FTGLTHIDA

SEQ ID NO: 2071 - protein, 10 aa, Hepatitis C Virus
FTGLTHIDAH

SEQ ID NO: 2072 - protein, 11 aa, Hepatitis C Virus
FTGLTHIDAHF

SEQ ID NO: 2073 - protein, 8 aa, Hepatitis C Virus
GAARALAH

SEQ ID NO: 2074 - protein, 11 aa, Hepatitis C Virus
GAARALAHGVR

SEQ ID NO: 2075 - protein, 10 aa, Hepatitis C Virus
GAGVAGALVA

SEQ ID NO: 2076 - protein, 11 aa, Hepatitis C Virus
GAGVAGALVAF

SEQ ID NO: 2077 - protein, 8 aa, Hepatitis C Virus
GAHWGVLA

SEQ ID NO: 2078 - protein, 10 aa, Hepatitis C Virus
GALVVGVVCA

SEQ ID NO: 2079 - protein, 11 aa, Hepatitis C Virus
GALVVGVVCAA

SEQ ID NO: 2080 - protein, 8 aa, Hepatitis C Virus
GARLVVLA

SEQ ID NO: 2081 - protein, 10 aa, Hepatitis C Virus
GARLVVLATA

SEQ ID NO: 2082 - protein, 8 aa, Hepatitis C Virus
GAVQWMNR

SEQ ID NO: 2083 - protein, 11 aa, Hepatitis C Virus
GAVQWMNRLIA

SEQ ID NO: 2084 - protein, 8 aa, Hepatitis C Virus
GAYMSKAH

SEQ ID NO: 2085 - protein, 10 aa, Hepatitis C Virus
GCAWYELTPA

SEQ ID NO: 2086 - protein, 10 aa, Hepatitis C Virus
GCSFSIFLLA

SEQ ID NO: 2087 - protein, 10 aa, Hepatitis C Virus
GCTWMNSTGF

SEQ ID NO: 2088 - protein, 11 aa, Hepatitis C Virus
GDDLVVICESA

SEQ ID NO: 2089 - protein, 8 aa, Hepatitis C Virus
GDLCGSVF

SEQ ID NO: 2090 - protein, 8 aa, Hepatitis C Virus
GFADLMGY

SEQ ID NO: 2091 - protein, 8 aa, Hepatitis C Virus
GFGAYMSK

SEQ ID NO: 2092 - protein, 9 aa, Hepatitis C Virus
GFGAYMSKA

SEQ ID NO: 2093 - protein, 10 aa, Hepatitis C Virus
GFGAYMSKAH

SEQ ID NO: 2094 - protein, 9 aa, Hepatitis C Virus
GFQYSPGQR

SEQ ID NO: 2095 - protein, 9 aa, Hepatitis C Virus
GFSYDTRCF

SEQ ID NO: 2096 - protein, 8 aa, Hepatitis C Virus
GGAARALA

SEQ ID NO: 2097 - protein, 9 aa, Hepatitis C Virus
GGAARALAH

SEQ ID NO: 2098 - protein, 8 aa, Hepatitis C Virus
GGCSGGAY

SEQ ID NO: 2099 - protein, 10 aa, Hepatitis C Virus
GGGQIVGGVY

SEQ ID NO: 2100 - protein, 8 aa, Hepatitis C Virus
GGHYVQMA

SEQ ID NO: 2101 - protein, 9 aa, Hepatitis C Virus
GGQIVGGVY

SEQ ID NO: 2102 - protein, 9 aa, Hepatitis C Virus
GGRHLIFCH

SEQ ID NO: 2103 - protein, 11 aa, Hepatitis C Virus
GGRHLIFCHSK

SEQ ID NO: 2104 - protein, 11 aa, Hepatitis C Virus
GGRKPARLIVF

SEQ ID NO: 2105 - protein, 8 aa, Hepatitis C Virus
GGVLAALA

SEQ ID NO: 2106 - protein, 9 aa, Hepatitis C Virus
GGVLAALAA

SEQ ID NO: 2107 - protein, 10 aa, Hepatitis C Virus
GGVLAALAAY

SEQ ID NO: 2108 - protein, 8 aa, Hepatitis C Virus
GGVYLLPR

SEQ ID NO: 2109 - protein, 9 aa, Hepatitis C Virus
GGVYLLPRR

SEQ ID NO: 2110 - protein, 9 aa, Hepatitis C Virus
GGWVAAQLA

SEQ ID NO: 2111 - protein, 9 aa, Hepatitis C Virus
GIGTVLDQA

SEQ ID NO: 2112 - protein, 8 aa, Hepatitis C Virus
GIYLLPNR

SEQ ID NO: 2113 - protein, 8 aa, Hepatitis C Virus
GLPVCQDH

SEQ ID NO: 2114 - protein, 11 aa, Hepatitis C Virus
GLPVCQDHLEF

SEQ ID NO: 2115 - protein, 8 aa, Hepatitis C Virus
GLPVSARR

SEQ ID NO: 2116 - protein, 8 aa, Hepatitis C Virus
GLRDLAVA

SEQ ID NO: 2117 - protein, 8 aa, Hepatitis C Virus
GLSAFSLH

SEQ ID NO: 2118 - protein, 10 aa, Hepatitis C Virus
GLSAFSLHSY

SEQ ID NO: 2119 - protein, 10 aa, Hepatitis C Virus
GLSTLPGNPA

SEQ ID NO: 2120 - protein, 8 aa, Hepatitis C Virus
GLTHIDAH

SEQ ID NO: 2121 - protein, 9 aa, Hepatitis C Virus
GLTHIDAHF

SEQ ID NO: 2122 - protein, 10 aa, Hepatitis C Virus
GSGKSTKVPA

SEQ ID NO: 2123 - protein, 11 aa, Hepatitis C Virus
GSGKSTKVPAA

SEQ ID NO: 2124 - protein, 10 aa, Hepatitis C Virus
GSSDLYLVTR

SEQ ID NO: 2125 - protein, 11 aa, Hepatitis C Virus
GSSDLYLVTRH

SEQ ID NO: 2126 - protein, 8 aa, Hepatitis C Virus
GSSYGFQY

SEQ ID NO: 2127 - protein, 8 aa, Hepatitis C Virus
GTFPINAY

SEQ ID NO: 2128 - protein, 10 aa, Hepatitis C Virus
GTVLDQAETA

SEQ ID NO: 2129 - protein, 8 aa, Hepatitis C Virus
GVAGALVA

SEQ ID NO: 2130 - protein, 9 aa, Hepatitis C Virus
GVAGALVAF

SEQ ID NO: 2131 - protein, 10 aa, Hepatitis C Virus
GVAGALVAFK

SEQ ID NO: 2132 - protein, 8 aa, Hepatitis C Virus
GVAKAVDF

SEQ ID NO: 2133 - protein, 8 aa, Hepatitis C Virus
GVCWTVYH

SEQ ID NO: 2134 - protein, 10 aa, Hepatitis C Virus
GVCWTVYHGA

SEQ ID NO: 2135 - protein, 10 aa, Hepatitis C Virus
GVGIYLLPNR

SEQ ID NO: 2136 - protein, 8 aa, Hepatitis C Virus
GVLAALAA

SEQ ID NO: 2137 - protein, 9 aa, Hepatitis C Virus
GVLAALAAY

SEQ ID NO: 2138 - protein, 11 aa, Hepatitis C Virus
GVRATRKTSER

SEQ ID NO: 2139 - protein, 9 aa, Hepatitis C Virus
GVRVCEKMA

SEQ ID NO: 2140 - protein, 11 aa, Hepatitis C Virus
GVRVCEKMALY

SEQ ID NO: 2141 - protein, 11 aa, Hepatitis C Virus
GVRVLEDGVNY

SEQ ID NO: 2142 - protein, 9 aa, Hepatitis C Virus
GVVCAAILR

SEQ ID NO: 2143 - protein, 10 aa, Hepatitis C Virus
GVVCAAILRR

SEQ ID NO: 2144 - protein, 11 aa, Hepatitis C Virus
GVVCAAILRRH

SEQ ID NO: 2145 - protein, 8 aa, Hepatitis C Virus
GVYLLPRR

SEQ ID NO: 2146 - protein, 11 aa, Hepatitis C Virus
GVYLLPRRGPR

SEQ ID NO: 2147 - protein, 8 aa, Hepatitis C Virus
HADVIPVR

SEQ ID NO: 2148 - protein, 9 aa, Hepatitis C Virus
HADVIPVRR

SEQ ID NO: 2149 - protein, 10 aa, Hepatitis C Virus
HADVIPVRRR

SEQ ID NO: 2150 - protein, 8 aa, Hepatitis C Virus
HAPTGSGK

SEQ ID NO: 2151 - protein, 11 aa, Hepatitis C Virus
HAPTGSGKSTK

SEQ ID NO: 2152 - protein, 9 aa, Hepatitis C Virus
HGLSAFSLH

SEQ ID NO: 2153 - protein, 11 aa, Hepatitis C Virus
HGLSAFSLHSY

SEQ ID NO: 2154 - protein, 8 aa, Hepatitis C Virus
HGPTPLLY

SEQ ID NO: 2155 - protein, 9 aa, Hepatitis C Virus
HGPTPLLYR

SEQ ID NO: 2156 - protein, 11 aa, Hepatitis C Virus
HIDAHFLSQTK

SEQ ID NO: 2157 - protein, 10 aa, Hepatitis C Virus
HLHAPTGSGK

SEQ ID NO: 2158 - protein, 11 aa, Hepatitis C Virus
HLHQNIVDVQY

SEQ ID NO: 2159 - protein, 8 aa, Hepatitis C Virus
HLIFCHSK

SEQ ID NO: 2160 - protein, 9 aa, Hepatitis C Virus
HLIFCHSKK

SEQ ID NO: 2161 - protein, 10 aa, Hepatitis C Virus
HLIFCHSKKK

SEQ ID NO: 2162 - protein, 11 aa, Hepatitis C Virus
HMWNFISGIQY

SEQ ID NO: 2163 - protein, 10 aa, Hepatitis C Virus
HSKKKCDELA

SEQ ID NO: 2164 - protein, 11 aa, Hepatitis C Virus
HSKKKCDELAA

SEQ ID NO: 2165 - protein, 10 aa, Hepatitis C Virus
HSYSPGEINR

SEQ ID NO: 2166 - protein, 10 aa, Hepatitis C Virus
HTPGCVPCVR

SEQ ID NO: 2167 - protein, 8 aa, Hepatitis C Virus
HVGPGEGA

SEQ ID NO: 2168 - protein, 9 aa, Hepatitis C Virus
IAFASRGNH

SEQ ID NO: 2169 - protein, 10 aa, Hepatitis C Virus
IDAHFLSQTK

SEQ ID NO: 2170 - protein, 8 aa, Hepatitis C Virus
IDTLTCGF

SEQ ID NO: 2171 - protein, 9 aa, Hepatitis C Virus
IDTLTCGFA

SEQ ID NO: 2172 - protein, 8 aa, Hepatitis C Virus
IFCHSKKK

SEQ ID NO: 2173 - protein, 8 aa, Hepatitis C Virus
IGTVLDQA

SEQ ID NO: 2174 - protein, 11 aa, Hepatitis C Virus
IGTVLDQAETA

SEQ ID NO: 2175 - protein, 8 aa, Hepatitis C Virus
IIICDECH

SEQ ID NO: 2176 - protein, 10 aa, Hepatitis C Virus
ILAGYGAGVA

SEQ ID NO: 2177 - protein, 8 aa, Hepatitis C Virus
ILGGWVAA

SEQ ID NO: 2178 - protein, 11 aa, Hepatitis C Virus
ILGGWVAAQLA

SEQ ID NO: 2179 - protein, 11 aa, Hepatitis C Virus
ILGIGTVLDQA

SEQ ID NO: 2180 - protein, 8 aa, Hepatitis C Virus
IMAKNEVF

SEQ ID NO: 2181 - protein, 8 aa, Hepatitis C Virus
ISGIQYLA

SEQ ID NO: 2182 - protein, 9 aa, Hepatitis C Virus
ITRVESENK

SEQ ID NO: 2183 - protein, 11 aa, Hepatitis C Virus
ITSCSSNVSVA

SEQ ID NO: 2184 - protein, 8 aa, Hepatitis C Virus
ITWGADTA

SEQ ID NO: 2185 - protein, 9 aa, Hepatitis C Virus
ITWGADTAA

SEQ ID NO: 2186 - protein, 8 aa, Hepatitis C Virus
ITYSTYGK

SEQ ID NO: 2187 - protein, 9 aa, Hepatitis C Virus
ITYSTYGKF

SEQ ID NO: 2188 - protein, 11 aa, Hepatitis C Virus
ITYSTYGKFLA

SEQ ID NO: 2189 - protein, 8 aa, Hepatitis C Virus
IVDVQYLY

SEQ ID NO: 2190 - protein, 9 aa, Hepatitis C Virus
IVFPDLGVR

SEQ ID NO: 2191 - protein, 10 aa, Hepatitis C Virus
IVGGVYLLPR

SEQ ID NO: 2192 - protein, 11 aa, Hepatitis C Virus
IVGGVYLLPRR

SEQ ID NO: 2193 - protein, 9 aa, Hepatitis C Virus
KALGLLQTA

SEQ ID NO: 2194 - protein, 8 aa, Hepatitis C Virus
KCDELAAK

SEQ ID NO: 2195 - protein, 10 aa, Hepatitis C Virus
KFGYGAKDVR

SEQ ID NO: 2196 - protein, 8 aa, Hepatitis C Virus
KGGRHLIF

SEQ ID NO: 2197 - protein, 10 aa, Hepatitis C Virus
KGGRHLIFCH

SEQ ID NO: 2198 - protein, 8 aa, Hepatitis C Virus
KGGRKPAR

SEQ ID NO: 2199 - protein, 8 aa, Hepatitis C Virus
KLGVPPLR

SEQ ID NO: 2200 - protein, 8 aa, Hepatitis C Virus
KSTKVPAA

SEQ ID NO: 2201 - protein, 9 aa, Hepatitis C Virus
KSTKVPAAY

SEQ ID NO: 2202 - protein, 10 aa, Hepatitis C Virus
KSTKVPAAYA

SEQ ID NO: 2203 - protein, 11 aa, Hepatitis C Virus
KSTKVPAAYAA

SEQ ID NO: 2204 - protein, 8 aa, Hepatitis C Virus
KTKRNTNR

SEQ ID NO: 2205 - protein, 9 aa, Hepatitis C Virus
KTKRNTNRR

SEQ ID NO: 2206 - protein, 9 aa, Hepatitis C Virus
KTSERSQPR

SEQ ID NO: 2207 - protein, 11 aa, Hepatitis C Virus
KTSERSQPRGR

SEQ ID NO: 2208 - protein, 10 aa, Hepatitis C Virus
KVIDTLTCGF

SEQ ID NO: 2209 - protein, 11 aa, Hepatitis C Virus
KVIDTLTCGFA

SEQ ID NO: 2210 - protein, 10 aa, Hepatitis C Virus
KVLVLNPSVA

SEQ ID NO: 2211 - protein, 11 aa, Hepatitis C Virus
KVLVLNPSVAA

SEQ ID NO: 2212 - protein, 8 aa, Hepatitis C Virus
KVPAAYAA

SEQ ID NO: 2213 - protein, 10 aa, Hepatitis C Virus
LADGGCSGGA

SEQ ID NO: 2214 - protein, 11 aa, Hepatitis C Virus
LADGGCSGGAY

SEQ ID NO: 2215 - protein, 8 aa, Hepatitis C Virus
LAEQFKQK

SEQ ID NO: 2216 - protein, 9 aa, Hepatitis C Virus
LAEQFKQKA

SEQ ID NO: 2217 - protein, 9 aa, Hepatitis C Virus
LAGYGAGVA

SEQ ID NO: 2218 - protein, 11 aa, Hepatitis C Virus
LAGYGAGVAGA

SEQ ID NO: 2219 - protein, 10 aa, Hepatitis C Virus
LCECYDAGCA

SEQ ID NO: 2220 - protein, 9 aa, Hepatitis C Virus
LDQAETAGA

SEQ ID NO: 2221 - protein, 10 aa, Hepatitis C Virus
LDQAETAGAR

SEQ ID NO: 2222 - protein, 8 aa, Hepatitis C Virus
LFLLLADA

SEQ ID NO: 2223 - protein, 9 aa, Hepatitis C Virus
LFLLLADAR

SEQ ID NO: 2224 - protein, 10 aa, Hepatitis C Virus
LFNILGGWVA

SEQ ID NO: 2225 - protein, 11 aa, Hepatitis C Virus
LFNILGGWVAA

SEQ ID NO: 2226 - protein, 8 aa, Hepatitis C Virus
LFTFSPRR

SEQ ID NO: 2227 - protein, 9 aa, Hepatitis C Virus
LGFGAYMSK

SEQ ID NO: 2228 - protein, 10 aa, Hepatitis C Virus
LGFGAYMSKA

SEQ ID NO: 2229 - protein, 11 aa, Hepatitis C Virus
LGFGAYMSKAH

SEQ ID NO: 2230 - protein, 9 aa, Hepatitis C Virus
LGGAARALA

SEQ ID NO: 2231 - protein, 10 aa, Hepatitis C Virus
LGGAARALAH

SEQ ID NO: 2232 - protein, 10 aa, Hepatitis C Virus
LGGWVAAQLA

SEQ ID NO: 2233 - protein, 10 aa, Hepatitis C Virus
LGIGTVLDQA

SEQ ID NO: 2234 - protein, 8 aa, Hepatitis C Virus
LGVRATRK

SEQ ID NO: 2235 - protein, 8 aa, Hepatitis C Virus
LGVRVCEK

SEQ ID NO: 2236 - protein, 10 aa, Hepatitis C Virus
LGVRVCEKMA

SEQ ID NO: 2237 - protein, 10 aa, Hepatitis C Virus
LIAFASRGNH

SEQ ID NO: 2238 - protein, 9 aa, Hepatitis C Virus
LIEANLLWR

SEQ ID NO: 2239 - protein, 8 aa, Hepatitis C Virus
LIFCHSKK

SEQ ID NO: 2240 - protein, 9 aa, Hepatitis C Virus
LIFCHSKKK

SEQ ID NO: 2241 - protein, 9 aa, Hepatitis C Virus
LINTNGSWH

SEQ ID NO: 2242 - protein, 10 aa, Hepatitis C Virus
LIVFPDLGVR

SEQ ID NO: 2243 - protein, 8 aa, Hepatitis C Virus
LLAPITAY

SEQ ID NO: 2244 - protein, 9 aa, Hepatitis C Virus
LLFLLLADA

SEQ ID NO: 2245 - protein, 10 aa, Hepatitis C Virus
LLFLLLADAR

SEQ ID NO: 2246 - protein, 11 aa, Hepatitis C Virus
LLFNILGGWVA

SEQ ID NO: 2247 - protein, 10 aa, Hepatitis C Virus
LLPAILSPGA

SEQ ID NO: 2248 - protein, 8 aa, Hepatitis C Virus
LLPRRGPR

SEQ ID NO: 2249 - protein, 8 aa, Hepatitis C Virus
LLSPRGSR

SEQ ID NO: 2250 - protein, 10 aa, Hepatitis C Virus
LMGYIPLVGA

SEQ ID NO: 2251 - protein, 9 aa, Hepatitis C Virus
LSAFSLHSY

SEQ ID NO: 2252 - protein, 8 aa, Hepatitis C Virus
LSAPSLKA

SEQ ID NO: 2253 - protein, 8 aa, Hepatitis C Virus
LSNSLLRH

SEQ ID NO: 2254 - protein, 9 aa, Hepatitis C Virus
LSNSLLRHH

SEQ ID NO: 2255 - protein, 9 aa, Hepatitis C Virus
LSTGLIHLH

SEQ ID NO: 2256 - protein, 9 aa, Hepatitis C Virus
LSTLPGNPA

SEQ ID NO: 2257 - protein, 11 aa, Hepatitis C Virus
LTCGFADLMGY

SEQ ID NO: 2258 - protein, 9 aa, Hepatitis C Virus
LTDPSHITA

SEQ ID NO: 2259 - protein, 8 aa, Hepatitis C Virus
LTHIDAHF

SEQ ID NO: 2260 - protein, 10 aa, Hepatitis C Virus
LTSMLTDPSH

SEQ ID NO: 2261 - protein, 10 aa, Hepatitis C Virus
LVAYQATVCA

SEQ ID NO: 2262 - protein, 11 aa, Hepatitis C Virus
LVAYQATVCAR

SEQ ID NO: 2263 - protein, 8 aa, Hepatitis C Virus
LVDILAGY

SEQ ID NO: 2264 - protein, 10 aa, Hepatitis C Virus
LVDILAGYGA

SEQ ID NO: 2265 - protein, 8 aa, Hepatitis C Virus
LVGGVLAA

SEQ ID NO: 2266 - protein, 10 aa, Hepatitis C Virus
LVGGVLAALA

SEQ ID NO: 2267 - protein, 11 aa, Hepatitis C Virus
LVGGVLAALAA

SEQ ID NO: 2268 - protein, 8 aa, Hepatitis C Virus
LVLNPSVA

SEQ ID NO: 2269 - protein, 9 aa, Hepatitis C Virus
LVLNPSVAA

SEQ ID NO: 2270 - protein, 8 aa, Hepatitis C Virus
LVVGVVCA

SEQ ID NO: 2271 - protein, 9 aa, Hepatitis C Virus
LVVGVVCAA

SEQ ID NO: 2272 - protein, 8 aa, Hepatitis C Virus
LVVICESA

SEQ ID NO: 2273 - protein, 8 aa, Hepatitis C Virus
MGFSYDTR

SEQ ID NO: 2274 - protein, 10 aa, Hepatitis C Virus
MGFSYDTRCF

SEQ ID NO: 2275 - protein, 9 aa, Hepatitis C Virus
MGSSYGFQY

SEQ ID NO: 2276 - protein, 9 aa, Hepatitis C Virus
MGYIPLVGA

SEQ ID NO: 2277 - protein, 8 aa, Hepatitis C Virus
MILMTHFF

SEQ ID NO: 2278 - protein, 10 aa, Hepatitis C Virus
MLTDPSHITA

SEQ ID NO: 2279 - protein, 9 aa, Hepatitis C Virus
MSTNPKPQR

SEQ ID NO: 2280 - protein, 10 aa, Hepatitis C Virus
MSTNPKPQRK

SEQ ID NO: 2281 - protein, 8 aa, Hepatitis C Virus
NCGYRRCR

SEQ ID NO: 2282 - protein, 9 aa, Hepatitis C Virus
NCGYRRCRA

SEQ ID NO: 2283 - protein, 8 aa, Hepatitis C Virus
NCSIYPGH

SEQ ID NO: 2284 - protein, 8 aa, Hepatitis C Virus
NFISGIQY

SEQ ID NO: 2285 - protein, 10 aa, Hepatitis C Virus
NFISGIQYLA

SEQ ID NO: 2286 - protein, 8 aa, Hepatitis C Virus
NGVCWTVY

SEQ ID NO: 2287 - protein, 9 aa, Hepatitis C Virus
NGVCWTVYH

SEQ ID NO: 2288 - protein, 11 aa, Hepatitis C Virus
NGVCWTVYHGA

SEQ ID NO: 2289 - protein, 8 aa, Hepatitis C Virus
NILGGWVA

SEQ ID NO: 2290 - protein, 9 aa, Hepatitis C Virus
NILGGWVAA

SEQ ID NO: 2291 - protein, 10 aa, Hepatitis C Virus
NITRVESENK

SEQ ID NO: 2292 - protein, 9 aa, Hepatitis C Virus
NIVDVQYLY

SEQ ID NO: 2293 - protein, 11 aa, Hepatitis C Virus
NLLPAILSPGA

SEQ ID NO: 2294 - protein, 10 aa, Hepatitis C Virus
NLPGCSFSIF

SEQ ID NO: 2295 - protein, 10 aa, Hepatitis C Virus
NTCVTQTVDF

SEQ ID NO: 2296 - protein, 10 aa, Hepatitis C Virus
NTNRRPQDVK

SEQ ID NO: 2297 - protein, 11 aa, Hepatitis C Virus
NTNRRPQDVKF

SEQ ID NO: 2298 - protein, 11 aa, Hepatitis C Virus
NTPGLPVCQDH

SEQ ID NO: 2299 - protein, 8 aa, Hepatitis C Virus
PAILSPGA

SEQ ID NO: 2300 - protein, 9 aa, Hepatitis C Virus
PALSTGLIH

SEQ ID NO: 2301 - protein, 11 aa, Hepatitis C Virus
PALSTGLIHLH

SEQ ID NO: 2302 - protein, 8 aa, Hepatitis C Virus
PCSGSWLR

SEQ ID NO: 2303 - protein, 10 aa, Hepatitis C Virus
PCTCGSSDLY

SEQ ID NO: 2304 - protein, 10 aa, Hepatitis C Virus
PDLGVRVCEK

SEQ ID NO: 2305 - protein, 11 aa, Hepatitis C Virus
PGALVVGVVCA

SEQ ID NO: 2306 - protein, 8 aa, Hepatitis C Virus
PGCSFSIF

SEQ ID NO: 2307 - protein, 11 aa, Hepatitis C Virus
PGCSFSIFLLA

SEQ ID NO: 2308 - protein, 8 aa, Hepatitis C Virus
PGCVPCVR

SEQ ID NO: 2309 - protein, 11 aa, Hepatitis C Virus
PGEGAVQWMNR

SEQ ID NO: 2310 - protein, 8 aa, Hepatitis C Virus
PGEINRVA

SEQ ID NO: 2311 - protein, 9 aa, Hepatitis C Virus
PGERPSGMF

SEQ ID NO: 2312 - protein, 11 aa, Hepatitis C Virus
PGGGQIVGGVY

SEQ ID NO: 2313 - protein, 9 aa, Hepatitis C Virus
PGLPVCQDH

SEQ ID NO: 2314 - protein, 8 aa, Hepatitis C Virus
PGYPWPLY

SEQ ID NO: 2315 - protein, 9 aa, Hepatitis C Virus
PITYSTYGK

SEQ ID NO: 2316 - protein, 10 aa, Hepatitis C Virus
PITYSTYGKF

SEQ ID NO: 2317 - protein, 8 aa, Hepatitis C Virus
PLGGAARA

SEQ ID NO: 2318 - protein, 10 aa, Hepatitis C Virus
PLGGAARALA

SEQ ID NO: 2319 - protein, 11 aa, Hepatitis C Virus
PLGGAARALAH

SEQ ID NO: 2320 - protein, 8 aa, Hepatitis C Virus
PLLYRLGA

SEQ ID NO: 2321 - protein, 9 aa, Hepatitis C Virus
PMGFSYDTR

SEQ ID NO: 2322 - protein, 11 aa, Hepatitis C Virus
PMGFSYDTRCF

SEQ ID NO: 2323 - protein, 11 aa, Hepatitis C Virus
PSPVVVGTTDR

SEQ ID NO: 2324 - protein, 9 aa, Hepatitis C Virus
PSVAATLGF

SEQ ID NO: 2325 - protein, 11 aa, Hepatitis C Virus
PSVAATLGFGA

SEQ ID NO: 2326 - protein, 8 aa, Hepatitis C Virus
PSWDQMWK

SEQ ID NO: 2327 - protein, 8 aa, Hepatitis C Virus
PTDCFRKH

SEQ ID NO: 2328 - protein, 9 aa, Hepatitis C Virus
PTDPRRRSR

SEQ ID NO: 2329 - protein, 9 aa, Hepatitis C Virus
PTGSGKSTK

SEQ ID NO: 2330 - protein, 10 aa, Hepatitis C Virus
PTHYVPESDA

SEQ ID NO: 2331 - protein, 11 aa, Hepatitis C Virus
PTHYVPESDAA

SEQ ID NO: 2332 - protein, 11 aa, Hepatitis C Virus
PTLHGPTPLLY

SEQ ID NO: 2333 - protein, 10 aa, Hepatitis C Virus
PTPLLYRLGA

SEQ ID NO: 2334 - protein, 9 aa, Hepatitis C Virus
PVCQDHLEF

SEQ ID NO: 2335 - protein, 9 aa, Hepatitis C Virus
PVVVGTTDR

SEQ ID NO: 2336 - protein, 8 aa, Hepatitis C Virus
QAETAGAR

SEQ ID NO: 2337 - protein, 8 aa, Hepatitis C Virus
QATVCARA

SEQ ID NO: 2338 - protein, 10 aa, Hepatitis C Virus
QATVCARAQA

SEQ ID NO: 2339 - protein, 11 aa, Hepatitis C Virus
QIVGGVYLLPR

SEQ ID NO: 2340 - protein, 8 aa, Hepatitis C Virus
QLFTFSPR

SEQ ID NO: 2341 - protein, 9 aa, Hepatitis C Virus
QLFTFSPRR

SEQ ID NO: 2342 - protein, 8 aa, Hepatitis C Virus
QLLRIPQA

SEQ ID NO: 2343 - protein, 8 aa, Hepatitis C Virus
QLSAPSLK

SEQ ID NO: 2344 - protein, 9 aa, Hepatitis C Virus
QLSAPSLKA

SEQ ID NO: 2345 - protein, 11 aa, Hepatitis C Virus
QTVDFSLDPTF

SEQ ID NO: 2346 - protein, 10 aa, Hepatitis C Virus
RAAVCTRGVA

SEQ ID NO: 2347 - protein, 11 aa, Hepatitis C Virus
RAAVCTRGVAK

SEQ ID NO: 2348 - protein, 8 aa, Hepatitis C Virus
RALAHGVR

SEQ ID NO: 2349 - protein, 9 aa, Hepatitis C Virus
RATRKTSER

SEQ ID NO: 2350 - protein, 9 aa, Hepatitis C Virus
RGNHVSPTH

SEQ ID NO: 2351 - protein, 10 aa, Hepatitis C Virus
RGNHVSPTHY

SEQ ID NO: 2352 - protein, 8 aa, Hepatitis C Virus
RGPRLGVR

SEQ ID NO: 2353 - protein, 9 aa, Hepatitis C Virus
RGPRLGVRA

SEQ ID NO: 2354 - protein, 11 aa, Hepatitis C Virus
RGPRLGVRATR

SEQ ID NO: 2355 - protein, 9 aa, Hepatitis C Virus
RGRRQPIPK

SEQ ID NO: 2356 - protein, 8 aa, Hepatitis C Virus
RGSLLSPR

SEQ ID NO: 2357 - protein, 9 aa, Hepatitis C Virus
RGVAKAVDF

SEQ ID NO: 2358 - protein, 8 aa, Hepatitis C Virus
RLGVRATR

SEQ ID NO: 2359 - protein, 9 aa, Hepatitis C Virus
RLGVRATRK

SEQ ID NO: 2360 - protein, 8 aa, Hepatitis C Virus
RLHGLSAF

SEQ ID NO: 2361 - protein, 11 aa, Hepatitis C Virus
RLHGLSAFSLH

SEQ ID NO: 2362 - protein, 8 aa, Hepatitis C Virus
RLIAFASR

SEQ ID NO: 2363 - protein, 11 aa, Hepatitis C Virus
RLIAFASRGNH

SEQ ID NO: 2364 - protein, 11 aa, Hepatitis C Virus
RLIVFPDLGVR

SEQ ID NO: 2365 - protein, 8 aa, Hepatitis C Virus
RLLAPITA

SEQ ID NO: 2366 - protein, 9 aa, Hepatitis C Virus
RLLAPITAY

SEQ ID NO: 2367 - protein, 8 aa, Hepatitis C Virus
RLVVLATA

SEQ ID NO: 2368 - protein, 8 aa, Hepatitis C Virus
RMILMTHF

SEQ ID NO: 2369 - protein, 9 aa, Hepatitis C Virus
RMILMTHFF

SEQ ID NO: 2370 - protein, 9 aa, Hepatitis C Virus
RMYVGGVEH

SEQ ID NO: 2371 - protein, 10 aa, Hepatitis C Virus
RMYVGGVEHR

SEQ ID NO: 2372 - protein, 8 aa, Hepatitis C Virus
RSQPRGRR

SEQ ID NO: 2373 - protein, 9 aa, Hepatitis C Virus
RVCEKMALY

SEQ ID NO: 2374 - protein, 9 aa, Hepatitis C Virus
RVLEDGVNY

SEQ ID NO: 2375 - protein, 10 aa, Hepatitis C Virus
RVLEDGVNYA

SEQ ID NO: 2376 - protein, 8 aa, Hepatitis C Virus
SAFSLHSY

SEQ ID NO: 2377 - protein, 11 aa, Hepatitis C Virus
SASQLSAPSLK

SEQ ID NO: 2378 - protein, 9 aa, Hepatitis C Virus
SCSSNVSVA

SEQ ID NO: 2379 - protein, 10 aa, Hepatitis C Virus
SCSSNVSVAH

SEQ ID NO: 2380 - protein, 8 aa, Hepatitis C Virus
SDLYLVTR

SEQ ID NO: 2381 - protein, 9 aa, Hepatitis C Virus
SDLYLVTRH

SEQ ID NO: 2382 - protein, 10 aa, Hepatitis C Virus
SDLYLVTRHA

SEQ ID NO: 2383 - protein, 8 aa, Hepatitis C Virus
SFSIFLLA

SEQ ID NO: 2384 - protein, 9 aa, Hepatitis C Virus
SGKSTKVPA

SEQ ID NO: 2385 - protein, 10 aa, Hepatitis C Virus
SGKSTKVPAA

SEQ ID NO: 2386 - protein, 11 aa, Hepatitis C Virus
SGKSTKVPAAY

SEQ ID NO: 2387 - protein, 8 aa, Hepatitis C Virus
SMLTDPSH

SEQ ID NO: 2388 - protein, 11 aa, Hepatitis C Virus
SMLTDPSHITA

SEQ ID NO: 2389 - protein, 8 aa, Hepatitis C Virus
SSASQLSA

SEQ ID NO: 2390 - protein, 9 aa, Hepatitis C Virus
SSDLYLVTR

SEQ ID NO: 2391 - protein, 10 aa, Hepatitis C Virus
SSDLYLVTRH

SEQ ID NO: 2392 - protein, 11 aa, Hepatitis C Virus
SSDLYLVTRHA

SEQ ID NO: 2393 - protein, 8 aa, Hepatitis C Virus
SSNVSVAH

SEQ ID NO: 2394 - protein, 9 aa, Hepatitis C Virus
SSSASQLSA

SEQ ID NO: 2395 - protein, 8 aa, Hepatitis C Virus
STGLIHLH

SEQ ID NO: 2396 - protein, 8 aa, Hepatitis C Virus
STKVPAAY

SEQ ID NO: 2397 - protein, 9 aa, Hepatitis C Virus
STKVPAAYA

SEQ ID NO: 2398 - protein, 10 aa, Hepatitis C Virus
STKVPAAYAA

SEQ ID NO: 2399 - protein, 8 aa, Hepatitis C Virus
STLPGNPA

SEQ ID NO: 2400 - protein, 8 aa, Hepatitis C Virus
STNPKPQR

SEQ ID NO: 2401 - protein, 9 aa, Hepatitis C Virus
STNPKPQRK

SEQ ID NO: 2402 - protein, 11 aa, Hepatitis C Virus
STNPKPQRKTK

SEQ ID NO: 2403 - protein, 11 aa, Hepatitis C Virus
STWVLVGGVLA

SEQ ID NO: 2404 - protein, 8 aa, Hepatitis C Virus
STYGKFLA

SEQ ID NO: 2405 - protein, 8 aa, Hepatitis C Virus
SVAATLGF

SEQ ID NO: 2406 - protein, 10 aa, Hepatitis C Virus
SVAATLGFGA

SEQ ID NO: 2407 - protein, 11 aa, Hepatitis C Virus
SVAATLGFGAY

SEQ ID NO: 2408 - protein, 10 aa, Hepatitis C Virus
TAGARLVVLA

SEQ ID NO: 2409 - protein, 10 aa, Hepatitis C Virus
TCGFADLMGY

SEQ ID NO: 2410 - protein, 8 aa, Hepatitis C Virus
TCGSSDLY

SEQ ID NO: 2411 - protein, 9 aa, Hepatitis C Virus
TCVTQTVDF

SEQ ID NO: 2412 - protein, 8 aa, Hepatitis C Virus
TDPRRRSR

SEQ ID NO: 2413 - protein, 8 aa, Hepatitis C Virus
TDPSHITA

SEQ ID NO: 2414 - protein, 9 aa, Hepatitis C Virus
TGEIPFYGK

SEQ ID NO: 2415 - protein, 10 aa, Hepatitis C Virus
TGEIPFYGKA

SEQ ID NO: 2416 - protein, 8 aa, Hepatitis C Virus
TGLTHIDA

SEQ ID NO: 2417 - protein, 9 aa, Hepatitis C Virus
TGLTHIDAH

SEQ ID NO: 2418 - protein, 10 aa, Hepatitis C Virus
TGLTHIDAHF

SEQ ID NO: 2419 - protein, 9 aa, Hepatitis C Virus
TGNLPGCSF

SEQ ID NO: 2420 - protein, 8 aa, Hepatitis C Virus
TGSGKSTK

SEQ ID NO: 2421 - protein, 11 aa, Hepatitis C Virus
TGSGKSTKVPA

SEQ ID NO: 2422 - protein, 9 aa, Hepatitis C Virus
TIMAKNEVF

SEQ ID NO: 2423 - protein, 10 aa, Hepatitis C Virus
TLGFGAYMSK

SEQ ID NO: 2424 - protein, 11 aa, Hepatitis C Virus
TLGFGAYMSKA

SEQ ID NO: 2425 - protein, 10 aa, Hepatitis C Virus
TLHGPTPLLY

SEQ ID NO: 2426 - protein, 11 aa, Hepatitis C Virus
TLHGPTPLLYR

SEQ ID NO: 2427 - protein, 11 aa, Hepatitis C Virus
TLPALSTGLIH

SEQ ID NO: 2428 - protein, 11 aa, Hepatitis C Virus
TLWARMILMTH

SEQ ID NO: 2429 - protein, 10 aa, Hepatitis C Virus
TSCSSNVSVA

SEQ ID NO: 2430 - protein, 11 aa, Hepatitis C Virus
TSCSSNVSVAH

SEQ ID NO: 2431 - protein, 8 aa, Hepatitis C Virus
TSERSQPR

SEQ ID NO: 2432 - protein, 10 aa, Hepatitis C Virus
TSERSQPRGR

SEQ ID NO: 2433 - protein, 11 aa, Hepatitis C Virus
TSERSQPRGRR

SEQ ID NO: 2434 - protein, 8 aa, Hepatitis C Virus
TSLTGRDK

SEQ ID NO: 2435 - protein, 9 aa, Hepatitis C Virus
TSMLTDPSH

SEQ ID NO: 2436 - protein, 10 aa, Hepatitis C Virus
TTIMAKNEVF

SEQ ID NO: 2437 - protein, 8 aa, Hepatitis C Virus
TTMRSPVF

SEQ ID NO: 2438 - protein, 8 aa, Hepatitis C Virus
TVCARAQA

SEQ ID NO: 2439 - protein, 10 aa, Hepatitis C Virus
TVDFSLDPTF

SEQ ID NO: 2440 - protein, 9 aa, Hepatitis C Virus
TVLDQAETA

SEQ ID NO: 2441 - protein, 11 aa, Hepatitis C Virus
TVLDQAETAGA

SEQ ID NO: 2442 - protein, 9 aa, Hepatitis C Virus
VAATLGFGA

SEQ ID NO: 2443 - protein, 10 aa, Hepatitis C Virus
VAATLGFGAY

SEQ ID NO: 2444 - protein, 8 aa, Hepatitis C Virus
VAGALVAF

SEQ ID NO: 2445 - protein, 9 aa, Hepatitis C Virus
VAGALVAFK

SEQ ID NO: 2446 - protein, 9 aa, Hepatitis C Virus
VAYQATVCA

SEQ ID NO: 2447 - protein, 10 aa, Hepatitis C Virus
VAYQATVCAR

SEQ ID NO: 2448 - protein, 11 aa, Hepatitis C Virus
VAYQATVCARA

SEQ ID NO: 2449 - protein, 8 aa, Hepatitis C Virus
VCAAILRR

SEQ ID NO: 2450 - protein, 9 aa, Hepatitis C Virus
VCAAILRRH

SEQ ID NO: 2451 - protein, 8 aa, Hepatitis C Virus
VCEKMALY

SEQ ID NO: 2452 - protein, 8 aa, Hepatitis C Virus
VCGPVYCF

SEQ ID NO: 2453 - protein, 8 aa, Hepatitis C Virus
VCQDHLEF

SEQ ID NO: 2454 - protein, 8 aa, Hepatitis C Virus
VCTRGVAK

SEQ ID NO: 2455 - protein, 9 aa, Hepatitis C Virus
VCTRGVAKA

SEQ ID NO: 2456 - protein, 9 aa, Hepatitis C Virus
VCWTVYHGA

SEQ ID NO: 2457 - protein, 9 aa, Hepatitis C Virus
VDFSLDPTF

SEQ ID NO: 2458 - protein, 9 aa, Hepatitis C Virus
VDILAGYGA

SEQ ID NO: 2459 - protein, 9 aa, Hepatitis C Virus
VDYPYRLWH

SEQ ID NO: 2460 - protein, 10 aa, Hepatitis C Virus
VDYPYRLWHY

SEQ ID NO: 2461 - protein, 8 aa, Hepatitis C Virus
VFCVQPEK

SEQ ID NO: 2462 - protein, 11 aa, Hepatitis C Virus
VFCVQPEKGGR

SEQ ID NO: 2463 - protein, 8 aa, Hepatitis C Virus
VFPDLGVR

SEQ ID NO: 2464 - protein, 10 aa, Hepatitis C Virus
VFTGLTHIDA

SEQ ID NO: 2465 - protein, 11 aa, Hepatitis C Virus
VFTGLTHIDAH

SEQ ID NO: 2466 - protein, 9 aa, Hepatitis C Virus
VGDLCGSVF

SEQ ID NO: 2467 - protein, 9 aa, Hepatitis C Virus
VGGVLAALA

SEQ ID NO: 2468 - protein, 10 aa, Hepatitis C Virus
VGGVLAALAA

SEQ ID NO: 2469 - protein, 11 aa, Hepatitis C Virus
VGGVLAALAAY

SEQ ID NO: 2470 - protein, 9 aa, Hepatitis C Virus
VGGVYLLPR

SEQ ID NO: 2471 - protein, 10 aa, Hepatitis C Virus
VGGVYLLPRR

SEQ ID NO: 2472 - protein, 9 aa, Hepatitis C Virus
VGIYLLPNR

SEQ ID NO: 2473 - protein, 10 aa, Hepatitis C Virus
VGVVCAAILR

SEQ ID NO: 2474 - protein, 11 aa, Hepatitis C Virus
VGVVCAAILRR

SEQ ID NO: 2475 - protein, 9 aa, Hepatitis C Virus
VIDTLTCGF

SEQ ID NO: 2476 - protein, 10 aa, Hepatitis C Virus
VIDTLTCGFA

SEQ ID NO: 2477 - protein, 8 aa, Hepatitis C Virus
VLAALAAY

SEQ ID NO: 2478 - protein, 8 aa, Hepatitis C Virus
VLCECYDA

SEQ ID NO: 2479 - protein, 11 aa, Hepatitis C Virus
VLCECYDAGCA

SEQ ID NO: 2480 - protein, 8 aa, Hepatitis C Virus
VLDQAETA

SEQ ID NO: 2481 - protein, 10 aa, Hepatitis C Virus
VLDQAETAGA

SEQ ID NO: 2482 - protein, 11 aa, Hepatitis C Virus
VLDQAETAGAR

SEQ ID NO: 2483 - protein, 8 aa, Hepatitis C Virus
VLEDGVNY

SEQ ID NO: 2484 - protein, 9 aa, Hepatitis C Virus
VLEDGVNYA

SEQ ID NO: 2485 - protein, 8 aa, Hepatitis C Virus
VLNPSVAA

SEQ ID NO: 2486 - protein, 11 aa, Hepatitis C Virus
VLTSMLTDPSH

SEQ ID NO: 2487 - protein, 9 aa, Hepatitis C Virus
VLVDILAGY

SEQ ID NO: 2488 - protein, 11 aa, Hepatitis C Virus
VLVDILAGYGA

SEQ ID NO: 2489 - protein, 8 aa, Hepatitis C Virus
VLVGGVLA

SEQ ID NO: 2490 - protein, 9 aa, Hepatitis C Virus
VLVGGVLAA

SEQ ID NO: 2491 - protein, 11 aa, Hepatitis C Virus
VLVGGVLAALA

SEQ ID NO: 2492 - protein, 9 aa, Hepatitis C Virus
VLVLNPSVA

SEQ ID NO: 2493 - protein, 10 aa, Hepatitis C Virus
VLVLNPSVAA

SEQ ID NO: 2494 - protein, 8 aa, Hepatitis C Virus
VMGSSYGF

SEQ ID NO: 2495 - protein, 10 aa, Hepatitis C Virus
VMGSSYGFQY

SEQ ID NO: 2496 - protein, 11 aa, Hepatitis C Virus
VTRHADVIPVR

SEQ ID NO: 2497 - protein, 8 aa, Hepatitis C Virus
VVCAAILR

SEQ ID NO: 2498 - protein, 9 aa, Hepatitis C Virus
VVCAAILRR

SEQ ID NO: 2499 - protein, 10 aa, Hepatitis C Virus
VVCAAILRRH

SEQ ID NO: 2500 - protein, 8 aa, Hepatitis C Virus
VVGVVCAA

SEQ ID NO: 2501 - protein, 11 aa, Hepatitis C Virus
VVGVVCAAILR

SEQ ID NO: 2502 - protein, 8 aa, Hepatitis C Virus
VVVGTTDR

SEQ ID NO: 2503 - protein, 9 aa, Hepatitis C Virus
WAGWLLSPR

SEQ ID NO: 2504 - protein, 8 aa, Hepatitis C Virus
WAKHMWNF

SEQ ID NO: 2505 - protein, 11 aa, Hepatitis C Virus
WAQPGYPWPLY

SEQ ID NO: 2506 - protein, 9 aa, Hepatitis C Virus
WARMILMTH

SEQ ID NO: 2507 - protein, 10 aa, Hepatitis C Virus
WARMILMTHF

SEQ ID NO: 2508 - protein, 11 aa, Hepatitis C Virus
WARMILMTHFF

SEQ ID NO: 2509 - protein, 8 aa, Hepatitis C Virus
WGPTDPRR

SEQ ID NO: 2510 - protein, 9 aa, Hepatitis C Virus
WGPTDPRRR

SEQ ID NO: 2511 - protein, 11 aa, Hepatitis C Virus
WGPTDPRRRSR

SEQ ID NO: 2512 - protein, 9 aa, Hepatitis C Virus
WLLSPRGSR

SEQ ID NO: 2513 - protein, 8 aa, Hepatitis C Virus
WMNRLIAF

SEQ ID NO: 2514 - protein, 9 aa, Hepatitis C Virus
WMNRLIAFA

SEQ ID NO: 2515 - protein, 11 aa, Hepatitis C Virus
WMNRLIAFASR

SEQ ID NO: 2516 - protein, 9 aa, Hepatitis C Virus
WMNSTGFTK

SEQ ID NO: 2517 - protein, 9 aa, Hepatitis C Virus
WVLVGGVLA

SEQ ID NO: 2518 - protein, 10 aa, Hepatitis C Virus
WVLVGGVLAA

SEQ ID NO: 2519 - protein, 11 aa, Hepatitis C Virus
YATGNLPGCSF

SEQ ID NO: 2520 - protein, 8 aa, Hepatitis C Virus
YDAGCAWY

SEQ ID NO: 2521 - protein, 10 aa, Hepatitis C Virus
YDIIICDECH

SEQ ID NO: 2522 - protein, 8 aa, Hepatitis C Virus
YGAGVAGA

SEQ ID NO: 2523 - protein, 11 aa, Hepatitis C Virus
YGAGVAGALVA

SEQ ID NO: 2524 - protein, 10 aa, Hepatitis C Virus
YGFQYSPGQR

SEQ ID NO: 2525 - protein, 9 aa, Hepatitis C Virus
YLLPRRGPR

SEQ ID NO: 2526 - protein, 11 aa, Hepatitis C Virus
YLVAYQATVCA

SEQ ID NO: 2527 - protein, 8 aa, Hepatitis C Virus
YSPGEINR

SEQ ID NO: 2528 - protein, 10 aa, Hepatitis C Virus
YSPGEINRVA

SEQ ID NO: 2529 - protein, 9 aa, Hepatitis C Virus
YSPGQRVEF

SEQ ID NO: 2530 - protein, 9 aa, Hepatitis C Virus
YSTYGKFLA

SEQ ID NO: 2531 - protein, 10 aa, Hepatitis C Virus
YVGDLCGSVF

SEQ ID NO: 2532 - protein, 8 aa, Hepatitis C Virus
YVGGVEHR

SEQ ID NO: 2533 - protein, 8 aa, Hepatitis C Virus
YVPESDAA

SEQ ID NO: 2534 - protein, 9 aa, Hepatitis C Virus
YVPESDAAA

SEQ ID NO: 2535 - protein, 10 aa, Hepatitis C Virus
YVPESDAAAR

SEQ ID NO: 2536 - protein, 10 aa, Hepatitis C Virus
AACNWTRGER

SEQ ID NO: 2537 - protein, 10 aa, Hepatitis C Virus
AARALAHGVR

SEQ ID NO: 2538 - protein, 9 aa, Hepatitis C Virus
AATLGFGAY

SEQ ID NO: 2539 - protein, 10 aa, Hepatitis C Virus
AAVCTRGVAK

SEQ ID NO: 2540 - protein, 9 aa, Hepatitis C Virus
ACNWTRGER

SEQ ID NO: 2541 - protein, 10 aa, Hepatitis C Virus
ADGGCSGGAY

SEQ ID NO: 2542 - protein, 8 aa, Hepatitis C Virus
ADVIPVRR

SEQ ID NO: 2543 - protein, 9 aa, Hepatitis C Virus
ADVIPVRRR

SEQ ID NO: 2544 - protein, 8 aa, Hepatitis C Virus
AFASRGNH

SEQ ID NO: 2545 - protein, 8 aa, Hepatitis C Virus
AGALVAFK

SEQ ID NO: 2546 - protein, 11 aa, Hepatitis C Virus
AGVAGALVAFK

SEQ ID NO: 2547 - protein, 8 aa, Hepatitis C Virus
AGWLLSPR

SEQ ID NO: 2548 - protein, 11 aa, Hepatitis C Virus
AGWLLSPRGSR

SEQ ID NO: 2549 - protein, 8 aa, Hepatitis C Virus
ALSTGLIH

SEQ ID NO: 2550 - protein, 10 aa, Hepatitis C Virus
ALSTGLIHLH

SEQ ID NO: 2551 - protein, 10 aa, Hepatitis C Virus
ASQLSAPSLK

SEQ ID NO: 2552 - protein, 11 aa, Hepatitis C Virus
ASRGNHVSPTH

SEQ ID NO: 2553 - protein, 8 aa, Hepatitis C Virus
ATLGFGAY

SEQ ID NO: 2554 - protein, 11 aa, Hepatitis C Virus
ATLGFGAYMSK

SEQ ID NO: 2555 - protein, 8 aa, Hepatitis C Virus
ATRKTSER

SEQ ID NO: 2556 - protein, 9 aa, Hepatitis C Virus
AVCTRGVAK

SEQ ID NO: 2557 - protein, 8 aa, Hepatitis C Virus
CAAILRRH

SEQ ID NO: 2558 - protein, 9 aa, Hepatitis C Virus
CGFADLMGY

SEQ ID NO: 2559 - protein, 8 aa, Hepatitis C Virus
CGNTLTCY

SEQ ID NO: 2560 - protein, 11 aa, Hepatitis C Virus
CGSSDLYLVTR

SEQ ID NO: 2561 - protein, 11 aa, Hepatitis C Virus
CLRKLGVPPLR

SEQ ID NO: 2562 - protein, 9 aa, Hepatitis C Virus
CNCSIYPGH

SEQ ID NO: 2563 - protein, 8 aa, Hepatitis C Virus
CNWTRGER

SEQ ID NO: 2564 - protein, 9 aa, Hepatitis C Virus
CSSNVSVAH

SEQ ID NO: 2565 - protein, 9 aa, Hepatitis C Virus
CTCGSSDLY

SEQ ID NO: 2566 - protein, 11 aa, Hepatitis C Virus
CTWMNSTGFTK

SEQ ID NO: 2567 - protein, 9 aa, Hepatitis C Virus
CVQPEKGGR

SEQ ID NO: 2568 - protein, 10 aa, Hepatitis C Virus
CVQPEKGGRK

SEQ ID NO: 2569 - protein, 9 aa, Hepatitis C Virus
DAHFLSQTK

SEQ ID NO: 2570 - protein, 9 aa, Hepatitis C Virus
DGGCSGGAY

SEQ ID NO: 2571 - protein, 9 aa, Hepatitis C Virus
DIIICDECH

SEQ ID NO: 2572 - protein, 9 aa, Hepatitis C Virus
DLGVRVCEK

SEQ ID NO: 2573 - protein, 8 aa, Hepatitis C Virus
DLYLVTRH

SEQ ID NO: 2574 - protein, 8 aa, Hepatitis C Virus
DVIPVRRR

SEQ ID NO: 2575 - protein, 10 aa, Hepatitis C Virus
ECYDAGCAWY

SEQ ID NO: 2576 - protein, 9 aa, Hepatitis C Virus
EGAVQWMNR

SEQ ID NO: 2577 - protein, 8 aa, Hepatitis C Virus
EMGGNITR

SEQ ID NO: 2578 - protein, 9 aa, Hepatitis C Virus
EVFCVQPEK

SEQ ID NO: 2579 - protein, 10 aa, Hepatitis C Virus
FCVQPEKGGR

SEQ ID NO: 2580 - protein, 11 aa, Hepatitis C Virus
FCVQPEKGGRK

SEQ ID NO: 2581 - protein, 9 aa, Hepatitis C Virus
FGAYMSKAH

SEQ ID NO: 2582 - protein, 9 aa, Hepatitis C Virus
FGYGAKDVR

SEQ ID NO: 2583 - protein, 8 aa, Hepatitis C Virus
FLLLADAR

SEQ ID NO: 2584 - protein, 8 aa, Hepatitis C Virus
FTEAMTRY

SEQ ID NO: 2585 - protein, 10 aa, Hepatitis C Virus
FTGLTHIDAH

SEQ ID NO: 2586 - protein, 8 aa, Hepatitis C Virus
GAARALAH

SEQ ID NO: 2587 - protein, 11 aa, Hepatitis C Virus
GAARALAHGVR

SEQ ID NO: 2588 - protein, 8 aa, Hepatitis C Virus
GAVQWMNR

SEQ ID NO: 2589 - protein, 8 aa, Hepatitis C Virus
GAYMSKAH

SEQ ID NO: 2590 - protein, 8 aa, Hepatitis C Virus
GFADLMGY

SEQ ID NO: 2591 - protein, 8 aa, Hepatitis C Virus
GFGAYMSK

SEQ ID NO: 2592 - protein, 10 aa, Hepatitis C Virus
GFGAYMSKAH

SEQ ID NO: 2593 - protein, 9 aa, Hepatitis C Virus
GFQYSPGQR

SEQ ID NO: 2594 - protein, 9 aa, Hepatitis C Virus
GGAARALAH

SEQ ID NO: 2595 - protein, 8 aa, Hepatitis C Virus
GGCSGGAY

SEQ ID NO: 2596 - protein, 10 aa, Hepatitis C Virus
GGGQIVGGVY

SEQ ID NO: 2597 - protein, 9 aa, Hepatitis C Virus
GGQIVGGVY

SEQ ID NO: 2598 - protein, 9 aa, Hepatitis C Virus
GGRHLIFCH

SEQ ID NO: 2599 - protein, 11 aa, Hepatitis C Virus
GGRHLIFCHSK

SEQ ID NO: 2600 - protein, 10 aa, Hepatitis C Virus
GGVLAALAAY

SEQ ID NO: 2601 - protein, 8 aa, Hepatitis C Virus
GGVYLLPR

SEQ ID NO: 2602 - protein, 9 aa, Hepatitis C Virus
GGVYLLPRR

SEQ ID NO: 2603 - protein, 8 aa, Hepatitis C Virus
GIYLLPNR

SEQ ID NO: 2604 - protein, 8 aa, Hepatitis C Virus
GLPVCQDH

SEQ ID NO: 2605 - protein, 8 aa, Hepatitis C Virus
GLPVSARR

SEQ ID NO: 2606 - protein, 8 aa, Hepatitis C Virus
GLSAFSLH

SEQ ID NO: 2607 - protein, 10 aa, Hepatitis C Virus
GLSAFSLHSY

SEQ ID NO: 2608 - protein, 8 aa, Hepatitis C Virus
GLTHIDAH

SEQ ID NO: 2609 - protein, 8 aa, Hepatitis C Virus
GNHVSPTH

SEQ ID NO: 2610 - protein, 9 aa, Hepatitis C Virus
GNHVSPTHY

SEQ ID NO: 2611 - protein, 11 aa, Hepatitis C Virus
GNITRVESENK

SEQ ID NO: 2612 - protein, 10 aa, Hepatitis C Virus
GSSDLYLVTR

SEQ ID NO: 2613 - protein, 11 aa, Hepatitis C Virus
GSSDLYLVTRH

SEQ ID NO: 2614 - protein, 8 aa, Hepatitis C Virus
GSSYGFQY

SEQ ID NO: 2615 - protein, 8 aa, Hepatitis C Virus
GTFPINAY

SEQ ID NO: 2616 - protein, 10 aa, Hepatitis C Virus
GVAGALVAFK

SEQ ID NO: 2617 - protein, 8 aa, Hepatitis C Virus
GVCWTVYH

SEQ ID NO: 2618 - protein, 10 aa, Hepatitis C Virus
GVGIYLLPNR

SEQ ID NO: 2619 - protein, 9 aa, Hepatitis C Virus
GVLAALAAY

SEQ ID NO: 2620 - protein, 11 aa, Hepatitis C Virus
GVRATRKTSER

SEQ ID NO: 2621 - protein, 11 aa, Hepatitis C Virus
GVRVCEKMALY

SEQ ID NO: 2622 - protein, 11 aa, Hepatitis C Virus
GVRVLEDGVNY

SEQ ID NO: 2623 - protein, 9 aa, Hepatitis C Virus
GVVCAAILR

SEQ ID NO: 2624 - protein, 10 aa, Hepatitis C Virus
GVVCAAILRR

SEQ ID NO: 2625 - protein, 11 aa, Hepatitis C Virus
GVVCAAILRRH

SEQ ID NO: 2626 - protein, 8 aa, Hepatitis C Virus
GVYLLPRR

SEQ ID NO: 2627 - protein, 11 aa, Hepatitis C Virus
GVYLLPRRGPR

SEQ ID NO: 2628 - protein, 8 aa, Hepatitis C Virus
HADVIPVR

SEQ ID NO: 2629 - protein, 9 aa, Hepatitis C Virus
HADVIPVRR

SEQ ID NO: 2630 - protein, 10 aa, Hepatitis C Virus
HADVIPVRRR

SEQ ID NO: 2631 - protein, 8 aa, Hepatitis C Virus
HAPTGSGK

SEQ ID NO: 2632 - protein, 11 aa, Hepatitis C Virus
HAPTGSGKSTK

SEQ ID NO: 2633 - protein, 9 aa, Hepatitis C Virus
HGLSAFSLH

SEQ ID NO: 2634 - protein, 11 aa, Hepatitis C Virus
HGLSAFSLHSY

SEQ ID NO: 2635 - protein, 8 aa, Hepatitis C Virus
HGPTPLLY

SEQ ID NO: 2636 - protein, 9 aa, Hepatitis C Virus
HGPTPLLYR

SEQ ID NO: 2637 - protein, 11 aa, Hepatitis C Virus
HIDAHFLSQTK

SEQ ID NO: 2638 - protein, 10 aa, Hepatitis C Virus
HLHAPTGSGK

SEQ ID NO: 2639 - protein, 11 aa, Hepatitis C Virus
HLHQNIVDVQY

SEQ ID NO: 2640 - protein, 8 aa, Hepatitis C Virus
HLIFCHSK

SEQ ID NO: 2641 - protein, 9 aa, Hepatitis C Virus
HLIFCHSKK

SEQ ID NO: 2642 - protein, 10 aa, Hepatitis C Virus
HLIFCHSKKK

SEQ ID NO: 2643 - protein, 11 aa, Hepatitis C Virus
HMWNFISGIQY

SEQ ID NO: 2644 - protein, 10 aa, Hepatitis C Virus
HSYSPGEINR

SEQ ID NO: 2645 - protein, 10 aa, Hepatitis C Virus
HTPGCVPCVR

SEQ ID NO: 2646 - protein, 9 aa, Hepatitis C Virus
IAFASRGNH

SEQ ID NO: 2647 - protein, 10 aa, Hepatitis C Virus
IDAHFLSQTK

SEQ ID NO: 2648 - protein, 8 aa, Hepatitis C Virus
IFCHSKKK

SEQ ID NO: 2649 - protein, 8 aa, Hepatitis C Virus
IIICDECH

SEQ ID NO: 2650 - protein, 8 aa, Hepatitis C Virus
INTNGSWH

SEQ ID NO: 2651 - protein, 9 aa, Hepatitis C Virus
ITRVESENK

SEQ ID NO: 2652 - protein, 8 aa, Hepatitis C Virus
ITYSTYGK

SEQ ID NO: 2653 - protein, 8 aa, Hepatitis C Virus
IVDVQYLY

SEQ ID NO: 2654 - protein, 9 aa, Hepatitis C Virus
IVFPDLGVR

SEQ ID NO: 2655 - protein, 10 aa, Hepatitis C Virus
IVGGVYLLPR

SEQ ID NO: 2656 - protein, 11 aa, Hepatitis C Virus
IVGGVYLLPRR

SEQ ID NO: 2657 - protein, 8 aa, Hepatitis C Virus
KCDELAAK

SEQ ID NO: 2658 - protein, 10 aa, Hepatitis C Virus
KFGYGAKDVR

SEQ ID NO: 2659 - protein, 10 aa, Hepatitis C Virus
KGGRHLIFCH

SEQ ID NO: 2660 - protein, 8 aa, Hepatitis C Virus
KGGRKPAR

SEQ ID NO: 2661 - protein, 8 aa, Hepatitis C Virus
KLGVPPLR

SEQ ID NO: 2662 - protein, 11 aa, Hepatitis C Virus
KNEVFCVQPEK

SEQ ID NO: 2663 - protein, 9 aa, Hepatitis C Virus
KSTKVPAAY

SEQ ID NO: 2664 - protein, 8 aa, Hepatitis C Virus
KTKRNTNR

SEQ ID NO: 2665 - protein, 9 aa, Hepatitis C Virus
KTKRNTNRR

SEQ ID NO: 2666 - protein, 9 aa, Hepatitis C Virus
KTSERSQPR

SEQ ID NO: 2667 - protein, 11 aa, Hepatitis C Virus
KTSERSQPRGR

SEQ ID NO: 2668 - protein, 11 aa, Hepatitis C Virus
LADGGCSGGAY

SEQ ID NO: 2669 - protein, 8 aa, Hepatitis C Virus
LAEQFKQK

SEQ ID NO: 2670 - protein, 10 aa, Hepatitis C Virus
LDQAETAGAR

SEQ ID NO: 2671 - protein, 9 aa, Hepatitis C Virus
LFLLLADAR

SEQ ID NO: 2672 - protein, 8 aa, Hepatitis C Virus
LFTFSPRR

SEQ ID NO: 2673 - protein, 9 aa, Hepatitis C Virus
LGFGAYMSK

SEQ ID NO: 2674 - protein, 11 aa, Hepatitis C Virus
LGFGAYMSKAH

SEQ ID NO: 2675 - protein, 10 aa, Hepatitis C Virus
LGGAARALAH

SEQ ID NO: 2676 - protein, 8 aa, Hepatitis C Virus
LGVRATRK

SEQ ID NO: 2677 - protein, 8 aa, Hepatitis C Virus
LGVRVCEK

SEQ ID NO: 2678 - protein, 10 aa, Hepatitis C Virus
LIAFASRGNH

SEQ ID NO: 2679 - protein, 9 aa, Hepatitis C Virus
LIEANLLWR

SEQ ID NO: 2680 - protein, 8 aa, Hepatitis C Virus
LIFCHSKK

SEQ ID NO: 2681 - protein, 9 aa, Hepatitis C Virus
LIFCHSKKK

SEQ ID NO: 2682 - protein, 9 aa, Hepatitis C Virus
LINTNGSWH

SEQ ID NO: 2683 - protein, 10 aa, Hepatitis C Virus
LIVFPDLGVR

SEQ ID NO: 2684 - protein, 8 aa, Hepatitis C Virus
LLAPITAY

SEQ ID NO: 2685 - protein, 10 aa, Hepatitis C Virus
LLFLLLADAR

SEQ ID NO: 2686 - protein, 8 aa, Hepatitis C Virus
LLPRRGPR

SEQ ID NO: 2687 - protein, 8 aa, Hepatitis C Virus
LLSPRGSR

SEQ ID NO: 2688 - protein, 9 aa, Hepatitis C Virus
LSAFSLHSY

SEQ ID NO: 2689 - protein, 8 aa, Hepatitis C Virus
LSNSLLRH

SEQ ID NO: 2690 - protein, 9 aa, Hepatitis C Virus
LSNSLLRHH

SEQ ID NO: 2691 - protein, 9 aa, Hepatitis C Virus
LSTGLIHLH

SEQ ID NO: 2692 - protein, 11 aa, Hepatitis C Virus
LTCGFADLMGY

SEQ ID NO: 2693 - protein, 10 aa, Hepatitis C Virus
LTSMLTDPSH

SEQ ID NO: 2694 - protein, 11 aa, Hepatitis C Virus
LVAYQATVCAR

SEQ ID NO: 2695 - protein, 8 aa, Hepatitis C Virus
LVDILAGY

SEQ ID NO: 2696 - protein, 8 aa, Hepatitis C Virus
MGFSYDTR

SEQ ID NO: 2697 - protein, 9 aa, Hepatitis C Virus
MGSSYGFQY

SEQ ID NO: 2698 - protein, 10 aa, Hepatitis C Virus
MNRLIAFASR

SEQ ID NO: 2699 - protein, 8 aa, Hepatitis C Virus
MNSTGFTK

SEQ ID NO: 2700 - protein, 9 aa, Hepatitis C Virus
MSTNPKPQR

SEQ ID NO: 2701 - protein, 10 aa, Hepatitis C Virus
MSTNPKPQRK

SEQ ID NO: 2702 - protein, 8 aa, Hepatitis C Virus
NCGYRRCR

SEQ ID NO: 2703 - protein, 8 aa, Hepatitis C Virus
NCSIYPGH

SEQ ID NO: 2704 - protein, 8 aa, Hepatitis C Virus
NFISGIQY

SEQ ID NO: 2705 - protein, 8 aa, Hepatitis C Virus
NGVCWTVY

SEQ ID NO: 2706 - protein, 9 aa, Hepatitis C Virus
NGVCWTVYH

SEQ ID NO: 2707 - protein, 10 aa, Hepatitis C Virus
NITRVESENK

SEQ ID NO: 2708 - protein, 9 aa, Hepatitis C Virus
NIVDVQYLY

SEQ ID NO: 2709 - protein, 10 aa, Hepatitis C Virus
NTNRRPQDVK

SEQ ID NO: 2710 - protein, 11 aa, Hepatitis C Virus
NTPGLPVCQDH

SEQ ID NO: 2711 - protein, 9 aa, Hepatitis C Virus
PALSTGLIH

SEQ ID NO: 2712 - protein, 11 aa, Hepatitis C Virus
PALSTGLIHLH

SEQ ID NO: 2713 - protein, 8 aa, Hepatitis C Virus
PCSGSWLR

SEQ ID NO: 2714 - protein, 10 aa, Hepatitis C Virus
PCTCGSSDLY

SEQ ID NO: 2715 - protein, 10 aa, Hepatitis C Virus
PDLGVRVCEK

SEQ ID NO: 2716 - protein, 8 aa, Hepatitis C Virus
PGCVPCVR

SEQ ID NO: 2717 - protein, 11 aa, Hepatitis C Virus
PGEGAVQWMNR

SEQ ID NO: 2718 - protein, 11 aa, Hepatitis C Virus
PGGGQIVGGVY

SEQ ID NO: 2719 - protein, 9 aa, Hepatitis C Virus
PGLPVCQDH

SEQ ID NO: 2720 - protein, 8 aa, Hepatitis C Virus
PGYPWPLY

SEQ ID NO: 2721 - protein, 9 aa, Hepatitis C Virus
PITYSTYGK

SEQ ID NO: 2722 - protein, 11 aa, Hepatitis C Virus
PLGGAARALAH

SEQ ID NO: 2723 - protein, 9 aa, Hepatitis C Virus
PMGFSYDTR

SEQ ID NO: 2724 - protein, 8 aa, Hepatitis C Virus
PNIRTGVR

SEQ ID NO: 2725 - protein, 11 aa, Hepatitis C Virus
PSPVVVGTTDR

SEQ ID NO: 2726 - protein, 8 aa, Hepatitis C Virus
PSWDQMWK

SEQ ID NO: 2727 - protein, 8 aa, Hepatitis C Virus
PTDCFRKH

SEQ ID NO: 2728 - protein, 9 aa, Hepatitis C Virus
PTDPRRRSR

SEQ ID NO: 2729 - protein, 9 aa, Hepatitis C Virus
PTGSGKSTK

SEQ ID NO: 2730 - protein, 11 aa, Hepatitis C Virus
PTLHGPTPLLY

SEQ ID NO: 2731 - protein, 9 aa, Hepatitis C Virus
PVVVGTTDR

SEQ ID NO: 2732 - protein, 8 aa, Hepatitis C Virus
QAETAGAR

SEQ ID NO: 2733 - protein, 11 aa, Hepatitis C Virus
QIVGGVYLLPR

SEQ ID NO: 2734 - protein, 8 aa, Hepatitis C Virus
QLFTFSPR

SEQ ID NO: 2735 - protein, 9 aa, Hepatitis C Virus
QLFTFSPRR

SEQ ID NO: 2736 - protein, 8 aa, Hepatitis C Virus
QLSAPSLK

SEQ ID NO: 2737 - protein, 8 aa, Hepatitis C Virus
QNIVDVQY

SEQ ID NO: 2738 - protein, 10 aa, Hepatitis C Virus
QNIVDVQYLY

SEQ ID NO: 2739 - protein, 11 aa, Hepatitis C Virus
RAAVCTRGVAK

SEQ ID NO: 2740 - protein, 8 aa, Hepatitis C Virus
RALAHGVR

SEQ ID NO: 2741 - protein, 9 aa, Hepatitis C Virus
RATRKTSER

SEQ ID NO: 2742 - protein, 9 aa, Hepatitis C Virus
RGNHVSPTH

SEQ ID NO: 2743 - protein, 10 aa, Hepatitis C Virus
RGNHVSPTHY

SEQ ID NO: 2744 - protein, 8 aa, Hepatitis C Virus
RGPRLGVR

SEQ ID NO: 2745 - protein, 11 aa, Hepatitis C Virus
RGPRLGVRATR

SEQ ID NO: 2746 - protein, 9 aa, Hepatitis C Virus
RGRRQPIPK

SEQ ID NO: 2747 - protein, 8 aa, Hepatitis C Virus
RGSLLSPR

SEQ ID NO: 2748 - protein, 8 aa, Hepatitis C Virus
RLGVRATR

SEQ ID NO: 2749 - protein, 9 aa, Hepatitis C Virus
RLGVRATRK

SEQ ID NO: 2750 - protein, 11 aa, Hepatitis C Virus
RLHGLSAFSLH

SEQ ID NO: 2751 - protein, 8 aa, Hepatitis C Virus
RLIAFASR

SEQ ID NO: 2752 - protein, 11 aa, Hepatitis C Virus
RLIAFASRGNH

SEQ ID NO: 2753 - protein, 11 aa, Hepatitis C Virus
RLIVFPDLGVR

SEQ ID NO: 2754 - protein, 9 aa, Hepatitis C Virus
RLLAPITAY

SEQ ID NO: 2755 - protein, 9 aa, Hepatitis C Virus
RMYVGGVEH

SEQ ID NO: 2756 - protein, 10 aa, Hepatitis C Virus
RMYVGGVEHR

SEQ ID NO: 2757 - protein, 11 aa, Hepatitis C Virus
RNTNRRPQDVK

SEQ ID NO: 2758 - protein, 8 aa, Hepatitis C Virus
RSQPRGRR

SEQ ID NO: 2759 - protein, 9 aa, Hepatitis C Virus
RVCEKMALY

SEQ ID NO: 2760 - protein, 9 aa, Hepatitis C Virus
RVLEDGVNY

SEQ ID NO: 2761 - protein, 8 aa, Hepatitis C Virus
SAFSLHSY

SEQ ID NO: 2762 - protein, 11 aa, Hepatitis C Virus
SASQLSAPSLK

SEQ ID NO: 2763 - protein, 10 aa, Hepatitis C Virus
SCSSNVSVAH

SEQ ID NO: 2764 - protein, 8 aa, Hepatitis C Virus
SDLYLVTR

SEQ ID NO: 2765 - protein, 9 aa, Hepatitis C Virus
SDLYLVTRH

SEQ ID NO: 2766 - protein, 11 aa, Hepatitis C Virus
SGKSTKVPAAY

SEQ ID NO: 2767 - protein, 8 aa, Hepatitis C Virus
SMLTDPSH

SEQ ID NO: 2768 - protein, 8 aa, Hepatitis C Virus
SNSLLRHH

SEQ ID NO: 2769 - protein, 9 aa, Hepatitis C Virus
SSDLYLVTR

SEQ ID NO: 2770 - protein, 10 aa, Hepatitis C Virus
SSDLYLVTRH

SEQ ID NO: 2771 - protein, 8 aa, Hepatitis C Virus
SSNVSVAH

SEQ ID NO: 2772 - protein, 8 aa, Hepatitis C Virus
STGLIHLH

SEQ ID NO: 2773 - protein, 8 aa, Hepatitis C Virus
STKVPAAY

SEQ ID NO: 2774 - protein, 8 aa, Hepatitis C Virus
STNPKPQR

SEQ ID NO: 2775 - protein, 9 aa, Hepatitis C Virus
STNPKPQRK

SEQ ID NO: 2776 - protein, 11 aa, Hepatitis C Virus
STNPKPQRKTK

SEQ ID NO: 2777 - protein, 11 aa, Hepatitis C Virus
SVAATLGFGAY

SEQ ID NO: 2778 - protein, 10 aa, Hepatitis C Virus
TCGFADLMGY

SEQ ID NO: 2779 - protein, 8 aa, Hepatitis C Virus
TCGSSDLY

SEQ ID NO: 2780 - protein, 8 aa, Hepatitis C Virus
TDPRRRSR

SEQ ID NO: 2781 - protein, 9 aa, Hepatitis C Virus
TGEIPFYGK

SEQ ID NO: 2782 - protein, 9 aa, Hepatitis C Virus
TGLTHIDAH

SEQ ID NO: 2783 - protein, 8 aa, Hepatitis C Virus
TGSGKSTK

SEQ ID NO: 2784 - protein, 10 aa, Hepatitis C Virus
TLGFGAYMSK

SEQ ID NO: 2785 - protein, 10 aa, Hepatitis C Virus
TLHGPTPLLY

SEQ ID NO: 2786 - protein, 11 aa, Hepatitis C Virus
TLHGPTPLLYR

SEQ ID NO: 2787 - protein, 11 aa, Hepatitis C Virus
TLPALSTGLIH

SEQ ID NO: 2788 - protein, 11 aa, Hepatitis C Virus
TLWARMILMTH

SEQ ID NO: 2789 - protein, 8 aa, Hepatitis C Virus
TNPKPQRK

SEQ ID NO: 2790 - protein, 10 aa, Hepatitis C Virus
TNPKPQRKTK

SEQ ID NO: 2791 - protein, 11 aa, Hepatitis C Virus
TNPKPQRKTKR

SEQ ID NO: 2792 - protein, 9 aa, Hepatitis C Virus
TNRRPQDVK

SEQ ID NO: 2793 - protein, 11 aa, Hepatitis C Virus
TSCSSNVSVAH

SEQ ID NO: 2794 - protein, 8 aa, Hepatitis C Virus
TSERSQPR

SEQ ID NO: 2795 - protein, 10 aa, Hepatitis C Virus
TSERSQPRGR

SEQ ID NO: 2796 - protein, 11 aa, Hepatitis C Virus
TSERSQPRGRR

SEQ ID NO: 2797 - protein, 8 aa, Hepatitis C Virus
TSLTGRDK

SEQ ID NO: 2798 - protein, 9 aa, Hepatitis C Virus
TSMLTDPSH

SEQ ID NO: 2799 - protein, 10 aa, Hepatitis C Virus
VAATLGFGAY

SEQ ID NO: 2800 - protein, 9 aa, Hepatitis C Virus
VAGALVAFK

SEQ ID NO: 2801 - protein, 10 aa, Hepatitis C Virus
VAYQATVCAR

SEQ ID NO: 2802 - protein, 8 aa, Hepatitis C Virus
VCAAILRR

SEQ ID NO: 2803 - protein, 9 aa, Hepatitis C Virus
VCAAILRRH

SEQ ID NO: 2804 - protein, 8 aa, Hepatitis C Virus
VCEKMALY

SEQ ID NO: 2805 - protein, 8 aa, Hepatitis C Virus
VCTRGVAK

SEQ ID NO: 2806 - protein, 9 aa, Hepatitis C Virus
VDYPYRLWH

SEQ ID NO: 2807 - protein, 10 aa, Hepatitis C Virus
VDYPYRLWHY

SEQ ID NO: 2808 - protein, 8 aa, Hepatitis C Virus
VFCVQPEK

SEQ ID NO: 2809 - protein, 11 aa, Hepatitis C Virus
VFCVQPEKGGR

SEQ ID NO: 2810 - protein, 8 aa, Hepatitis C Virus
VFPDLGVR

SEQ ID NO: 2811 - protein, 11 aa, Hepatitis C Virus
VFTGLTHIDAH

SEQ ID NO: 2812 - protein, 11 aa, Hepatitis C Virus
VGGVLAALAAY

SEQ ID NO: 2813 - protein, 9 aa, Hepatitis C Virus
VGGVYLLPR

SEQ ID NO: 2814 - protein, 10 aa, Hepatitis C Virus
VGGVYLLPRR

SEQ ID NO: 2815 - protein, 9 aa, Hepatitis C Virus
VGIYLLPNR

SEQ ID NO: 2816 - protein, 10 aa, Hepatitis C Virus
VGVVCAAILR

SEQ ID NO: 2817 - protein, 11 aa, Hepatitis C Virus
VGVVCAAILRR

SEQ ID NO: 2818 - protein, 8 aa, Hepatitis C Virus
VLAALAAY

SEQ ID NO: 2819 - protein, 11 aa, Hepatitis C Virus
VLDQAETAGAR

SEQ ID NO: 2820 - protein, 8 aa, Hepatitis C Virus
VLEDGVNY

SEQ ID NO: 2821 - protein, 11 aa, Hepatitis C Virus
VLTSMLTDPSH

SEQ ID NO: 2822 - protein, 9 aa, Hepatitis C Virus
VLVDILAGY

SEQ ID NO: 2823 - protein, 10 aa, Hepatitis C Virus
VMGSSYGFQY

SEQ ID NO: 2824 - protein, 11 aa, Hepatitis C Virus
VTRHADVIPVR

SEQ ID NO: 2825 - protein, 8 aa, Hepatitis C Virus
VVCAAILR

SEQ ID NO: 2826 - protein, 9 aa, Hepatitis C Virus
VVCAAILRR

SEQ ID NO: 2827 - protein, 10 aa, Hepatitis C Virus
VVCAAILRRH

SEQ ID NO: 2828 - protein, 11 aa, Hepatitis C Virus
VVGVVCAAILR

SEQ ID NO: 2829 - protein, 8 aa, Hepatitis C Virus
VVVGTTDR

SEQ ID NO: 2830 - protein, 9 aa, Hepatitis C Virus
WAGWLLSPR

SEQ ID NO: 2831 - protein, 11 aa, Hepatitis C Virus
WAQPGYPWPLY

SEQ ID NO: 2832 - protein, 9 aa, Hepatitis C Virus
WARMILMTH

SEQ ID NO: 2833 - protein, 8 aa, Hepatitis C Virus
WGPTDPRR

SEQ ID NO: 2834 - protein, 9 aa, Hepatitis C Virus
WGPTDPRRR

SEQ ID NO: 2835 - protein, 11 aa, Hepatitis C Virus
WGPTDPRRRSR

SEQ ID NO: 2836 - protein, 9 aa, Hepatitis C Virus
WLLSPRGSR

SEQ ID NO: 2837 - protein, 11 aa, Hepatitis C Virus
WMNRLIAFASR

SEQ ID NO: 2838 - protein, 9 aa, Hepatitis C Virus
WMNSTGFTK

SEQ ID NO: 2839 - protein, 9 aa, Hepatitis C Virus
WNFISGIQY

SEQ ID NO: 2840 - protein, 8 aa, Hepatitis C Virus
YDAGCAWY

SEQ ID NO: 2841 - protein, 10 aa, Hepatitis C Virus
YDIIICDECH

SEQ ID NO: 2842 - protein, 10 aa, Hepatitis C Virus
YGFQYSPGQR

SEQ ID NO: 2843 - protein, 9 aa, Hepatitis C Virus
YLLPRRGPR

SEQ ID NO: 2844 - protein, 8 aa, Hepatitis C Virus
YSPGEINR

SEQ ID NO: 2845 - protein, 8 aa, Hepatitis C Virus
YVGGVEHR

SEQ ID NO: 2846 - protein, 10 aa, Hepatitis C Virus
YVPESDAAAR

SEQ ID NO: 2847 - protein, 8 aa, Hepatitis C Virus
AWDMMMNW

SEQ ID NO: 2848 - protein, 10 aa, Hepatitis C Virus
AYAAQGYKVL

SEQ ID NO: 2849 - protein, 11 aa, Hepatitis C Virus
AYYRGLDVSVI

SEQ ID NO: 2850 - protein, 8 aa, Hepatitis C Virus
CYDAGCAW

SEQ ID NO: 2851 - protein, 11 aa, Hepatitis C Virus
CYDAGCAWYEL

SEQ ID NO: 2852 - protein, 8 aa, Hepatitis C Virus
DFSLDPTF

SEQ ID NO: 2853 - protein, 10 aa, Hepatitis C Virus
DFSLDPTFTI

SEQ ID NO: 2854 - protein, 9 aa, Hepatitis C Virus
FWAKHMWNF

SEQ ID NO: 2855 - protein, 10 aa, Hepatitis C Virus
FWAKHMWNFI

SEQ ID NO: 2856 - protein, 9 aa, Hepatitis C Virus
GFADLMGYI

SEQ ID NO: 2857 - protein, 11 aa, Hepatitis C Virus
GFADLMGYIPL

SEQ ID NO: 2858 - protein, 9 aa, Hepatitis C Virus
GFSYDTRCF

SEQ ID NO: 2859 - protein, 8 aa, Hepatitis C Virus
GWRLLAPI

SEQ ID NO: 2860 - protein, 10 aa, Hepatitis C Virus
GYGAGVAGAL

SEQ ID NO: 2861 - protein, 10 aa, Hepatitis C Virus
GYIPLVGAPL

SEQ ID NO: 2862 - protein, 11 aa, Hepatitis C Virus
GYRRCRASGVL

SEQ ID NO: 2863 - protein, 9 aa, Hepatitis C Virus
HMWNFISGI

SEQ ID NO: 2864 - protein, 10 aa, Hepatitis C Virus
IFLLALLSCL

SEQ ID NO: 2865 - protein, 8 aa, Hepatitis C Virus
IMAKNEVF

SEQ ID NO: 2866 - protein, 8 aa, Hepatitis C Virus
KFPGGGQI

SEQ ID NO: 2867 - protein, 8 aa, Hepatitis C Virus
LFNILGGW

SEQ ID NO: 2868 - protein, 11 aa, Hepatitis C Virus
LWARMILMTHF

SEQ ID NO: 2869 - protein, 10 aa, Hepatitis C Virus
LWRQEMGGNI

SEQ ID NO: 2870 - protein, 11 aa, Hepatitis C Virus
LYLVTRHADVI

SEQ ID NO: 2871 - protein, 8 aa, Hepatitis C Virus
MWNFISGI

SEQ ID NO: 2872 - protein, 11 aa, Hepatitis C Virus
MWNFISGIQYL

SEQ ID NO: 2873 - protein, 10 aa, Hepatitis C Virus
MYVGGVEHRL

SEQ ID NO: 2874 - protein, 9 aa, Hepatitis C Virus
NFISGIQYL

SEQ ID NO: 2875 - protein, 11 aa, Hepatitis C Virus
PMGFSYDTRCF

SEQ ID NO: 2876 - protein, 9 aa, Hepatitis C Virus
QFKQKALGL

SEQ ID NO: 2877 - protein, 10 aa, Hepatitis C Virus
QFKQKALGLL

SEQ ID NO: 2878 - protein, 9 aa, Hepatitis C Virus
QWMNRLIAF

SEQ ID NO: 2879 - protein, 9 aa, Hepatitis C Virus
QYLAGLSTL

SEQ ID NO: 2880 - protein, 10 aa, Hepatitis C Virus
QYSPGQRVEF

SEQ ID NO: 2881 - protein, 11 aa, Hepatitis C Virus
QYSPGQRVEFL

SEQ ID NO: 2882 - protein, 10 aa, Hepatitis C Virus
RMAWDMMMNW

SEQ ID NO: 2883 - protein, 8 aa, Hepatitis C Virus
RMILMTHF

SEQ ID NO: 2884 - protein, 9 aa, Hepatitis C Virus
RMILMTHFF

SEQ ID NO: 2885 - protein, 11 aa, Hepatitis C Virus
RMYVGGVEHRL

SEQ ID NO: 2886 - protein, 9 aa, Hepatitis C Virus
SFSIFLLAL

SEQ ID NO: 2887 - protein, 10 aa, Hepatitis C Virus
SFSIFLLALL

SEQ ID NO: 2888 - protein, 9 aa, Hepatitis C Virus
SMLTDPSHI

SEQ ID NO: 2889 - protein, 9 aa, Hepatitis C Virus
SWDQMWKCL

SEQ ID NO: 2890 - protein, 11 aa, Hepatitis C Virus
SYLKGSSGGPL

SEQ ID NO: 2891 - protein, 8 aa, Hepatitis C Virus
TWMNSTGF

SEQ ID NO: 2892 - protein, 9 aa, Hepatitis C Virus
TWVLVGGVL

SEQ ID NO: 2893 - protein, 8 aa, Hepatitis C Virus
TYSTYGKF

SEQ ID NO: 2894 - protein, 9 aa, Hepatitis C Virus
TYSTYGKFL

SEQ ID NO: 2895 - protein, 8 aa, Hepatitis C Virus
VFTGLTHI

SEQ ID NO: 2896 - protein, 8 aa, Hepatitis C Virus
VMGSSYGF

SEQ ID NO: 2897 - protein, 11 aa, Hepatitis C Virus
VYLLPRRGPRL

SEQ ID NO: 2898 - protein, 8 aa, Hepatitis C Virus
WMNRLIAF

SEQ ID NO: 2899 - protein, 10 aa, Hepatitis C Virus
YYRGLDVSVI

SEQ ID NO: 2900 - protein, 15 aa, Hepatitis C Virus
TLGFGAYMSKAHGVD

SEQ ID NO: 2901 - protein, 15 aa, Hepatitis C Virus
GNWFGCTWMNSTGFT

SEQ ID NO: 2902 - protein, 15 aa, Hepatitis C Virus
AEQFKQKALGLLQTA

SEQ ID NO: 2903 - protein, 15 aa, Hepatitis C Virus
FSIFLLALLSCLTVP

SEQ ID NO: 2904 - protein, 15 aa, Hepatitis C Virus
LIVFPDLGVRVCEKM

SEQ ID NO: 2905 - protein, 15 aa, Hepatitis C Virus
PQTFQVAHLHAPTGS

SEQ ID NO: 2906 - protein, 15 aa, Hepatitis C Virus
VGIFRAAVCTRGVAK

SEQ ID NO: 2907 - protein, 15 aa, Hepatitis C Virus
GCSFSIFLLALLSCL

SEQ ID NO: 2908 - protein, 15 aa, Hepatitis C Virus
TVDFSLDPTFTIETT

SEQ ID NO: 2909 - protein, 15 aa, Hepatitis C Virus
LRVFTEAMTRYSAPP

SEQ ID NO: 2910 - protein, 15 aa, Hepatitis C Virus
VYCFTPSPVVVGTTD

SEQ ID NO: 2911 - protein, 15 aa, Hepatitis C Virus
PCSFTTLPALSTGLI

SEQ ID NO: 2912 - protein, 15 aa, Hepatitis C Virus
LEVFWAKHMWNFISG

SEQ ID NO: 2913 - protein, 15 aa, Hepatitis C Virus
LTHIDAHFLSQTKQA

SEQ ID NO: 2914 - protein, 15 aa, Hepatitis C Virus
DSVIDCNTCVTQTVD

SEQ ID NO: 2915 - protein, 15 aa, Hepatitis C Virus
GKVIDTLTCGFADLM

SEQ ID NO: 2916 - protein, 15 aa, Hepatitis C Virus
ADLIEANLLWRQEMG

SEQ ID NO: 2917 - protein, 15 aa, Hepatitis C Virus
SFSIFLLALLSCLTV

SEQ ID NO: 2918 - protein, 15 aa, Hepatitis C Virus
LFNILGGWVAAQLAP

SEQ ID NO: 2919 - protein, 15 aa, Hepatitis C Virus
STTILGIGTVLDQAE

SEQ ID NO: 2920 - protein, 15 aa, Hepatitis C Virus
CAAILRRHVGPGEGA

SEQ ID NO: 2921 - protein, 15 aa, Hepatitis C Virus
LPAILSPGALVVGVV

SEQ ID NO: 2922 - protein, 15 aa, Hepatitis C Virus
TFPINAYTTGPCTPS

SEQ ID NO: 2923 - protein, 15 aa, Hepatitis C Virus
MGYIPLVGAPLGGAA

SEQ ID NO: 2924 - protein, 15 aa, Hepatitis C Virus
GGNITRVESENKVVI

SEQ ID NO: 2925 - protein, 15 aa, Hepatitis C Virus
LELITSCSSNVSVAH

SEQ ID NO: 2926 - protein, 15 aa, Hepatitis C Virus
ARLIVFPDLGVRVCE

SEQ ID NO: 2927 - protein, 15 aa, Hepatitis C Virus
GGVLAALAAYCLTTG

SEQ ID NO: 2928 - protein, 15 aa, Hepatitis C Virus
GKFLADGGCSGGAYD

SEQ ID NO: 2929 - protein, 15 aa, Hepatitis C Virus
IQYLAGLSTLPGNPA

SEQ ID NO: 2930 - protein, 15 aa, Hepatitis C Virus
VDILAGYGAGVAGAL

SEQ ID NO: 2931 - protein, 15 aa, Hepatitis C Virus
LVVLATATPPGSVTV

SEQ ID NO: 2932 - protein, 15 aa, Hepatitis C Virus
DFSLDPTFTIETTTV

SEQ ID NO: 2933 - protein, 15 aa, Hepatitis C Virus
GTVLDQAETAGARLV

SEQ ID NO: 2934 - protein, 15 aa, Hepatitis C Virus
EYDLELITSCSSNVS

SEQ ID NO: 2935 - protein, 15 aa, Hepatitis C Virus
SADLEVVTSTWVLVG

SEQ ID NO: 2936 - protein, 15 aa, Hepatitis C Virus
VVLLFLLLADARVCS

SEQ ID NO: 2937 - protein, 15 aa, Hepatitis C Virus
FNILGGWVAAQLAPP

SEQ ID NO: 2938 - protein, 15 aa, Hepatitis C Virus
TTILGIGTVLDQAET

SEQ ID NO: 2939 - protein, 15 aa, Hepatitis C Virus
GPRLGVRATRKTSER

SEQ ID NO: 2940 - protein, 15 aa, Hepatitis C Virus
FPDLGVRVCEKMALY

SEQ ID NO: 2941 - protein, 15 aa, Hepatitis C Virus
IERLHGLSAFSLHSY

SEQ ID NO: 2942 - protein, 15 aa, Hepatitis C Virus
KPTLHGPTPLLYRLG

SEQ ID NO: 2943 - protein, 15 aa, Hepatitis C Virus
LIHLHQNIVDVQYLY

SEQ ID NO: 2944 - protein, 15 aa, Hepatitis C Virus
AFSLHSYSPGEINRV

SEQ ID NO: 2945 - protein, 15 aa, Hepatitis C Virus
MNRLIAFASRGNHVS

SEQ ID NO: 2946 - protein, 15 aa, Hepatitis C Virus
DADLIEANLLWRQEM

SEQ ID NO: 2947 - protein, 15 aa, Hepatitis C Virus
GRHLIFCHSKKKCDE

SEQ ID NO: 2948 - protein, 15 aa, Hepatitis C Virus
DLELITSCSSNVSVA

SEQ ID NO: 2949 - protein, 15 aa, Hepatitis C Virus
SIFLLALLSCLTVPA

SEQ ID NO: 2950 - protein, 15 aa, Hepatitis C Virus
YVVLLFLLLADARVC

SEQ ID NO: 2951 - protein, 15 aa, Hepatitis C Virus
QNTLLFNILGGWVAA

SEQ ID NO: 2952 - protein, 15 aa, Hepatitis C Virus
LLFLLLADARVCACL

SEQ ID NO: 2953 - protein, 15 aa, Hepatitis C Virus
LVNLLPAILSPGALV

SEQ ID NO: 2954 - protein, 15 aa, Hepatitis C Virus
FADLMGYIPLVGAPL

SEQ ID NO: 2955 - protein, 15 aa, Hepatitis C Virus
VLVLNPSVAATLGFG

SEQ ID NO: 2956 - protein, 15 aa, Hepatitis C Virus
VNLLPAILSPGALVV

SEQ ID NO: 2957 - protein, 15 aa, Hepatitis C Virus
FTTLPALSTGLIHLH

SEQ ID NO: 2958 - protein, 15 aa, Hepatitis C Virus
VYLLPRRGPRLGVRA

SEQ ID NO: 2959 - protein, 15 aa, Hepatitis C Virus
HNGLRDLAVAVEPVV

SEQ ID NO: 2960 - protein, 15 aa, Hepatitis C Virus
ASCLRKLGVPPLRVW

SEQ ID NO: 2961 - protein, 15 aa, Hepatitis C Virus
LHGLSAFSLHSYSPG

SEQ ID NO: 2962 - protein, 15 aa, Hepatitis C Virus
ASQLSAPSLKATCTT

SEQ ID NO: 2963 - protein, 15 aa, Hepatitis C Virus
INALSNSLLRHHNMV

SEQ ID NO: 2964 - protein, 15 aa, Hepatitis C Virus
PAILSPGALVVGVVC

SEQ ID NO: 2965 - protein, 15 aa, Hepatitis C Virus
RSELSPLLLSTTEWQ

SEQ ID NO: 2966 - protein, 15 aa, Hepatitis C Virus
GWLLSPRGSRPSWGP

SEQ ID NO: 2967 - protein, 15 aa, Hepatitis C Virus
LPALSTGLIHLHQNI

SEQ ID NO: 2968 - protein, 15 aa, Hepatitis C Virus
IDTLTCGFADLMGYI

SEQ ID NO: 2969 - protein, 15 aa, Hepatitis C Virus
FTGLTHIDAHFLSQT

SEQ ID NO: 2970 - protein, 15 aa, Hepatitis C Virus
VAVLTSMLTDPSHIT

SEQ ID NO: 2971 - protein, 15 aa, Hepatitis C Virus
FPYLVAYQATVCARA

SEQ ID NO: 2972 - protein, 15 aa, Hepatitis C Virus
GKVLVDILAGYGAGV

SEQ ID NO: 2973 - protein, 15 aa, Hepatitis C Virus
TWVLVGGVLAALAAY

SEQ ID NO: 2974 - protein, 15 aa, Hepatitis C Virus
YKVLVLNPSVAATLG

SEQ ID NO: 2975 - protein, 15 aa, Hepatitis C Virus
TEDLVNLLPAILSPG

SEQ ID NO: 2976 - protein, 15 aa, Hepatitis C Virus
DLYLVTRHADVIPVR

SEQ ID NO: 2977 - protein, 15 aa, Hepatitis C Virus
PGALVVGVVCAAILR

SEQ ID NO: 2978 - protein, 15 aa, Hepatitis C Virus
GARLVVLATATPPGS

SEQ ID NO: 2979 - protein, 15 aa, Hepatitis C Virus
APTLWARMILMTHFF

SEQ ID NO: 2980 - protein, 15 aa, Hepatitis C Virus
ANLLWRQEMGGNITR

SEQ ID NO: 2981 - protein, 15 aa, Hepatitis C Virus
TPLLYRLGAVQNEVT

SEQ ID NO: 2982 - protein, 15 aa, Hepatitis C Virus
TTIMAKNEVFCVQPE

SEQ ID NO: 2983 - protein, 15 aa, Hepatitis C Virus
GHRMAWDMMMNWSPT

SEQ ID NO: 2984 - protein, 15 aa, Hepatitis C Virus
RQEMGGNITRVESEN

SEQ ID NO: 2985 - protein, 15 aa, Hepatitis C Virus
ADLMGYIPLVGAPLG

SEQ ID NO: 2986 - protein, 15 aa, Hepatitis C Virus
LTSMLTDPSHITAET

SEQ ID NO: 2987 - protein, 15 aa, Hepatitis C Virus
VQWMNRLIAFASRGN

SEQ ID NO: 2988 - protein, 15 aa, Hepatitis C Virus
TEAMTRYSAPPGDPP

SEQ ID NO: 2989 - protein, 15 aa, Hepatitis C Virus
AKHMWNFISGIQYLA

SEQ ID NO: 2990 - protein, 15 aa, Hepatitis C Virus
KVRMYVGGVEHRLNA

SEQ ID NO: 2991 - protein, 15 aa, Hepatitis C Virus
GAGVAGALVAFKVMS

SEQ ID NO: 2992 - protein, 15 aa, Hepatitis C Virus
TFQVAHLHAPTGSGK

SEQ ID NO: 2993 - protein, 15 aa, Hepatitis C Virus
VVVVATDALMTGYTG

SEQ ID NO: 2994 - protein, 15 aa, Hepatitis C Virus
PYLVAYQATVCARAQ

SEQ ID NO: 2995 - protein, 15 aa, Hepatitis C Virus
VGVVCAAILRRHVGP

SEQ ID NO: 2996 - protein, 15 aa, Hepatitis C Virus
GVRVCEKMALYDVVS

SEQ ID NO: 2997 - protein, 15 aa, Hepatitis C Virus
GLPVCQDHLEFWESV

SEQ ID NO: 2998 - protein, 15 aa, Hepatitis C Virus
RAAVCTRGVAKAVDF

SEQ ID NO: 2999 - protein, 15 aa, Hepatitis C Virus
KNEVFCVQPEKGGRK

SEQ ID NO: 3000 - protein, 15 aa, Hepatitis C Virus
RSPVFTDNSSPPAVP

SEQ ID NO: 3001 - protein, 15 aa, Hepatitis C Virus
WESVFTGLTHIDAHF

SEQ ID NO: 3002 - protein, 15 aa, Hepatitis C Virus
WVLVGGVLAALAAYC

SEQ ID NO: 3003 - protein, 15 aa, Hepatitis C Virus
GQIVGGVYLLPRRGP

SEQ ID NO: 3004 - protein, 15 aa, Hepatitis C Virus
QYLVGSQLPCEPEPD

SEQ ID NO: 3005 - protein, 15 aa, Hepatitis C Virus
ALVVGVVCAAILRRH

SEQ ID NO: 3006 - protein, 15 aa, Hepatitis C Virus
FDSVIDCNTCVTQTV

SEQ ID NO: 3007 - protein, 15 aa, Hepatitis C Virus
LGKVIDTLTCGFADL

SEQ ID NO: 3008 - protein, 15 aa, Hepatitis C Virus
VGGVLAALAAYCLTT

SEQ ID NO: 3009 - protein, 15 aa, Hepatitis C Virus
RLVVLATATPPGSVT

SEQ ID NO: 3010 - protein, 15 aa, Hepatitis C Virus
GVRVLEDGVNYATGN

SEQ ID NO: 3011 - protein, 15 aa, Hepatitis C Virus
KVLVLNPSVAATLGF

SEQ ID NO: 3012 - protein, 15 aa, Hepatitis C Virus
DVAVLTSMLTDPSHI

SEQ ID NO: 3013 - protein, 15 aa, Hepatitis C Virus
ASGVLTTSCGNTLTC

SEQ ID NO: 3014 - protein, 15 aa, Hepatitis C Virus
LGKVLVDILAGYGAG

SEQ ID NO: 3015 - protein, 15 aa, Hepatitis C Virus
STWVLVGGVLAALAA

SEQ ID NO: 3016 - protein, 15 aa, Hepatitis C Virus
GYKVLVLNPSVAATL

SEQ ID NO: 3017 - protein, 15 aa, Hepatitis C Virus
EDLVNLLPAILSPGA

SEQ ID NO: 3018 - protein, 15 aa, Hepatitis C Virus
THYVPESDAAARVTQ

SEQ ID NO: 3019 - protein, 15 aa, Hepatitis C Virus
LEVVTSTWVLVGGVL

SEQ ID NO: 3020 - protein, 15 aa, Hepatitis C Virus
DVVVVATDALMTGYT

SEQ ID NO: 3021 - protein, 15 aa, Hepatitis C Virus
VVGVVCAAILRRHVG

SEQ ID NO: 3022 - protein, 15 aa, Hepatitis C Virus
GALVVGVVCAAILRR

SEQ ID NO: 3023 - protein, 15 aa, Hepatitis C Virus
ARLVVLATATPPGSV

SEQ ID NO: 3024 - protein, 15 aa, Hepatitis C Virus
CGPVYCFTPSPVVVG

SEQ ID NO: 3025 - protein, 15 aa, Hepatitis C Virus
GCGWAGWLLSPRGSR

SEQ ID NO: 3026 - protein, 15 aa, Hepatitis C Virus
PTLWARMILMTHFFS

SEQ ID NO: 3027 - protein, 15 aa, Hepatitis C Virus
IITWGADTAACGDII

SEQ ID NO: 3028 - protein, 15 aa, Hepatitis C Virus
RPSWGPTDPRRRSRN

SEQ ID NO: 3029 - protein, 15 aa, Hepatitis C Virus
AVQWMNRLIAFASRG

SEQ ID NO: 3030 - protein, 15 aa, Hepatitis C Virus
SKGWRLLAPITAYAQ

SEQ ID NO: 3031 - protein, 15 aa, Hepatitis C Virus
SYTWTGALITPCAAE

SEQ ID NO: 3032 - protein, 15 aa, Hepatitis C Virus
GCAWYELTPAETTVR

SEQ ID NO: 3033 - protein, 15 aa, Hepatitis C Virus
GVNYATGNLPGCSFS

SEQ ID NO: 3034 - protein, 15 aa, Hepatitis C Virus
GPVYCFTPSPVVVGT

SEQ ID NO: 3035 - protein, 15 aa, Hepatitis C Virus
CECYDAGCAWYELTP

SEQ ID NO: 3036 - protein, 15 aa, Hepatitis C Virus
GGAYDIIICDECHST

SEQ ID NO: 3037 - protein, 15 aa, Hepatitis C Virus
QPEYDLELITSCSSN

SEQ ID NO: 3038 - protein, 15 aa, Hepatitis C Virus
LAGYGAGVAGALVAF

SEQ ID NO: 3039 - protein, 15 aa, Hepatitis C Virus
GSSYGFQYSPGQRVE

SEQ ID NO: 3040 - protein, 15 aa, Hepatitis C Virus
YSTYGKFLADGGCSG

SEQ ID NO: 3041 - protein, 15 aa, Hepatitis C Virus
AQGYKVLVLNPSVAA

SEQ ID NO: 3042 - protein, 15 aa, Hepatitis C Virus
GIQYLAGLSTLPGNP

SEQ ID NO: 3043 - protein, 15 aa, Hepatitis C Virus
PVSYLKGSSGGPLLC

SEQ ID NO: 3044 - protein, 15 aa, Hepatitis C Virus
RVYYLTRDPTTPLAR

SEQ ID NO: 3045 - protein, 15 aa, Hepatitis C Virus
LVAYQATVCARAQAP

SEQ ID NO: 3046 - protein, 15 aa, Hepatitis C Virus
VAYYRGLDVSVIPTS

SEQ ID NO: 3047 - protein, 15 aa, Hepatitis C Virus
PLLYRLGAVQNEVTL

SEQ ID NO: 3048 - protein, 15 aa, Hepatitis C Virus
NCGYRRCRASGVLTT

SEQ ID NO: 3049 - protein, 15 aa, Hepatitis C Virus
GACYSIEPLDLPQII

SEQ ID NO: 3050 - protein, 15 aa, Hepatitis C Virus
LHSYSPGEINRVASC

SEQ ID NO: 3051 - protein, 15 aa, Hepatitis C Virus
SAMYVGDLCGSVFLV

SEQ ID NO: 3052 - protein, 9 aa, Hepatitis C Virus
FGAYMSKAH

SEQ ID NO: 3053 - protein, 9 aa, Hepatitis C Virus
FGCTWMNST

SEQ ID NO: 3054 - protein, 9 aa, Hepatitis C Virus
FKQKALGLL

SEQ ID NO: 3055 - protein, 9 aa, Hepatitis C Virus
FLLALLSCL

SEQ ID NO: 3056 - protein, 9 aa, Hepatitis C Virus
FPDLGVRVC

SEQ ID NO: 3057 - protein, 9 aa, Hepatitis C Virus
FQVAHLHAP

SEQ ID NO: 3058 - protein, 9 aa, Hepatitis C Virus
FRAAVCTRG

SEQ ID NO: 3059 - protein, 9 aa, Hepatitis C Virus
FSIFLLALL

SEQ ID NO: 3060 - protein, 9 aa, Hepatitis C Virus
FSLDPTFTI

SEQ ID NO: 3061 - protein, 9 aa, Hepatitis C Virus
FTEAMTRYS

SEQ ID NO: 3062 - protein, 9 aa, Hepatitis C Virus
FTPSPVVVG

SEQ ID NO: 3063 - protein, 9 aa, Hepatitis C Virus
FTTLPALST

SEQ ID NO: 3064 - protein, 9 aa, Hepatitis C Virus
FWAKHMWNF

SEQ ID NO: 3065 - protein, 9 aa, Hepatitis C Virus
IDAHFLSQT

SEQ ID NO: 3066 - protein, 9 aa, Hepatitis C Virus
IDCNTCVTQ

SEQ ID NO: 3067 - protein, 9 aa, Hepatitis C Virus
IDTLTCGFA

SEQ ID NO: 3068 - protein, 9 aa, Hepatitis C Virus
IEANLLWRQ

SEQ ID NO: 3069 - protein, 9 aa, Hepatitis C Virus
IFLLALLSC

SEQ ID NO: 3070 - protein, 9 aa, Hepatitis C Virus
ILGGWVAAQ

SEQ ID NO: 3071 - protein, 9 aa, Hepatitis C Virus
ILGIGTVLD

SEQ ID NO: 3072 - protein, 9 aa, Hepatitis C Virus
ILRRHVGPG

SEQ ID NO: 3073 - protein, 9 aa, Hepatitis C Virus
ILSPGALVV

SEQ ID NO: 3074 - protein, 9 aa, Hepatitis C Virus
INAYTTGPC

SEQ ID NO: 3075 - protein, 9 aa, Hepatitis C Virus
IPLVGAPLG

SEQ ID NO: 3076 - protein, 9 aa, Hepatitis C Virus
ITRVESENK

SEQ ID NO: 3077 - protein, 9 aa, Hepatitis C Virus
ITSCSSNVS

SEQ ID NO: 3078 - protein, 9 aa, Hepatitis C Virus
IVFPDLGVR

SEQ ID NO: 3079 - protein, 9 aa, Hepatitis C Virus
LAALAAYCL

SEQ ID NO: 3080 - protein, 9 aa, Hepatitis C Virus
LADGGCSGG

SEQ ID NO: 3081 - protein, 9 aa, Hepatitis C Virus
LAGLSTLPG

SEQ ID NO: 3082 - protein, 9 aa, Hepatitis C Virus
LAGYGAGVA

SEQ ID NO: 3083 - protein, 9 aa, Hepatitis C Virus
LATATPPGS

SEQ ID NO: 3084 - protein, 9 aa, Hepatitis C Virus
LDPTFTIET

SEQ ID NO: 3085 - protein, 9 aa, Hepatitis C Virus
LDQAETAGA

SEQ ID NO: 3086 - protein, 9 aa, Hepatitis C Virus
LELITSCSS

SEQ ID NO: 3087 - protein, 9 aa, Hepatitis C Virus
LEVVTSTWV

SEQ ID NO: 3088 - protein, 9 aa, Hepatitis C Virus
LFLLLADAR

SEQ ID NO: 3089 - protein, 9 aa, Hepatitis C Virus
LGGWVAAQL

SEQ ID NO: 3090 - protein, 9 aa, Hepatitis C Virus
LGIGTVLDQ

SEQ ID NO: 3091 - protein, 9 aa, Hepatitis C Virus
LGVRATRKT

SEQ ID NO: 3092 - protein, 9 aa, Hepatitis C Virus
LGVRVCEKM

SEQ ID NO: 3093 - protein, 9 aa, Hepatitis C Virus
LHGLSAFSL

SEQ ID NO: 3094 - protein, 9 aa, Hepatitis C Virus
LHGPTPLLY

SEQ ID NO: 3095 - protein, 9 aa, Hepatitis C Virus
LHQNIVDVQ

SEQ ID NO: 3096 - protein, 9 aa, Hepatitis C Virus
LHSYSPGEI

SEQ ID NO: 3097 - protein, 9 aa, Hepatitis C Virus
LIAFASRGN

SEQ ID NO: 3098 - protein, 9 aa, Hepatitis C Virus
LIEANLLWR

SEQ ID NO: 3099 - protein, 9 aa, Hepatitis C Virus
LIFCHSKKK

SEQ ID NO: 3100 - protein, 9 aa, Hepatitis C Virus
LITSCSSNV

SEQ ID NO: 3101 - protein, 9 aa, Hepatitis C Virus
LLALLSCLT

SEQ ID NO: 3102 - protein, 9 aa, Hepatitis C Virus
LLFLLLADA

SEQ ID NO: 3103 - protein, 9 aa, Hepatitis C Virus
LLFNILGGW

SEQ ID NO: 3104 - protein, 9 aa, Hepatitis C Virus
LLLADARVC

SEQ ID NO: 3105 - protein, 9 aa, Hepatitis C Virus
LLPAILSPG

SEQ ID NO: 3106 - protein, 9 aa, Hepatitis C Virus
LMGYIPLVG

SEQ ID NO: 3107 - protein, 9 aa, Hepatitis C Virus
LNPSVAATL

SEQ ID NO: 3108 - protein, 9 aa, Hepatitis C Virus
LPAILSPGA

SEQ ID NO: 3109 - protein, 9 aa, Hepatitis C Virus
LPALSTGLI

SEQ ID NO: 3110 - protein, 9 aa, Hepatitis C Virus
LPRRGPRLG

SEQ ID NO: 3111 - protein, 9 aa, Hepatitis C Virus
LRDLAVAVE

SEQ ID NO: 3112 - protein, 9 aa, Hepatitis C Virus
LRKLGVPPL

SEQ ID NO: 3113 - protein, 9 aa, Hepatitis C Virus
LSAFSLHSY

SEQ ID NO: 3114 - protein, 9 aa, Hepatitis C Virus
LSAPSLKAT

SEQ ID NO: 3115 - protein, 9 aa, Hepatitis C Virus
LSNSLLRHH

SEQ ID NO: 3116 - protein, 9 aa, Hepatitis C Virus
LSPGALVVG

SEQ ID NO: 3117 - protein, 9 aa, Hepatitis C Virus
LSPLLLSTT

SEQ ID NO: 3118 - protein, 9 aa, Hepatitis C Virus
LSPRGSRPS

SEQ ID NO: 3119 - protein, 9 aa, Hepatitis C Virus
LSTGLIHLH

SEQ ID NO: 3120 - protein, 9 aa, Hepatitis C Virus
LTCGFADLM

SEQ ID NO: 3121 - protein, 9 aa, Hepatitis C Virus
LTHIDAHFL

SEQ ID NO: 3122 - protein, 9 aa, Hepatitis C Virus
LTSMLTDPS

SEQ ID NO: 3123 - protein, 9 aa, Hepatitis C Virus
LVAYQATVC

SEQ ID NO: 3124 - protein, 9 aa, Hepatitis C Virus
LVDILAGYG

SEQ ID NO: 3125 - protein, 9 aa, Hepatitis C Virus
LVGGVLAAL

SEQ ID NO: 3126 - protein, 9 aa, Hepatitis C Virus
LVLNPSVAA

SEQ ID NO: 3127 - protein, 9 aa, Hepatitis C Virus
LVNLLPAIL

SEQ ID NO: 3128 - protein, 9 aa, Hepatitis C Virus
LVTRHADVI

SEQ ID NO: 3129 - protein, 9 aa, Hepatitis C Virus
LVVGVVCAA

SEQ ID NO: 3130 - protein, 9 aa, Hepatitis C Virus
LVVLATATP

SEQ ID NO: 3131 - protein, 9 aa, Hepatitis C Virus
LWARMILMT

SEQ ID NO: 3132 - protein, 9 aa, Hepatitis C Virus
LWRQEMGGN

SEQ ID NO: 3133 - protein, 9 aa, Hepatitis C Virus
LYRLGAVQN

SEQ ID NO: 3134 - protein, 9 aa, Hepatitis C Virus
MAKNEVFCV

SEQ ID NO: 3135 - protein, 9 aa, Hepatitis C Virus
MAWDMMMNW

SEQ ID NO: 3136 - protein, 9 aa, Hepatitis C Virus
MGGNITRVE

SEQ ID NO: 3137 - protein, 9 aa, Hepatitis C Virus
MGYIPLVGA

SEQ ID NO: 3138 - protein, 9 aa, Hepatitis C Virus
MLTDPSHIT

SEQ ID NO: 3139 - protein, 9 aa, Hepatitis C Virus
MNRLIAFAS

SEQ ID NO: 3140 - protein, 9 aa, Hepatitis C Virus
MTRYSAPPG

SEQ ID NO: 3141 - protein, 9 aa, Hepatitis C Virus
MWNFISGIQ

SEQ ID NO: 3142 - protein, 9 aa, Hepatitis C Virus
MYVGGVEHR

SEQ ID NO: 3143 - protein, 9 aa, Hepatitis C Virus
VAGALVAFK

SEQ ID NO: 3144 - protein, 9 aa, Hepatitis C Virus
VAHLHAPTG

SEQ ID NO: 3145 - protein, 9 aa, Hepatitis C Virus
VATDALMTG

SEQ ID NO: 3146 - protein, 9 aa, Hepatitis C Virus
VAYQATVCA

SEQ ID NO: 3147 - protein, 9 aa, Hepatitis C Virus
VCAAILRRH

SEQ ID NO: 3148 - protein, 9 aa, Hepatitis C Virus
VCEKMALYD

SEQ ID NO: 3149 - protein, 9 aa, Hepatitis C Virus
VCQDHLEFW

SEQ ID NO: 3150 - protein, 9 aa, Hepatitis C Virus
VCTRGVAKA

SEQ ID NO: 3151 - protein, 9 aa, Hepatitis C Virus
VFCVQPEKG

SEQ ID NO: 3152 - protein, 9 aa, Hepatitis C Virus
VFTDNSSPP

SEQ ID NO: 3153 - protein, 9 aa, Hepatitis C Virus
VFTGLTHID

SEQ ID NO: 3154 - protein, 9 aa, Hepatitis C Virus
VGGVLAALA

SEQ ID NO: 3155 - protein, 9 aa, Hepatitis C Virus
VGGVYLLPR

SEQ ID NO: 3156 - protein, 9 aa, Hepatitis C Virus
VGSQLPCEP

SEQ ID NO: 3157 - protein, 9 aa, Hepatitis C Virus
VGVVCAAIL

SEQ ID NO: 3158 - protein, 9 aa, Hepatitis C Virus
VIDCNTCVT

SEQ ID NO: 3159 - protein, 9 aa, Hepatitis C Virus
VIDTLTCGF

SEQ ID NO: 3160 - protein, 9 aa, Hepatitis C Virus
VLAALAAYC

SEQ ID NO: 3161 - protein, 9 aa, Hepatitis C Virus
VLATATPPG

SEQ ID NO: 3162 - protein, 9 aa, Hepatitis C Virus
VLEDGVNYA

SEQ ID NO: 3163 - protein, 9 aa, Hepatitis C Virus
VLNPSVAAT

SEQ ID NO: 3164 - protein, 9 aa, Hepatitis C Virus
VLTSMLTDP

SEQ ID NO: 3165 - protein, 9 aa, Hepatitis C Virus
VLTTSCGNT

SEQ ID NO: 3166 - protein, 9 aa, Hepatitis C Virus
VLVDILAGY

SEQ ID NO: 3167 - protein, 9 aa, Hepatitis C Virus
VLVGGVLAA

SEQ ID NO: 3168 - protein, 9 aa, Hepatitis C Virus
VLVLNPSVA

SEQ ID NO: 3169 - protein, 9 aa, Hepatitis C Virus
VNLLPAILS

SEQ ID NO: 3170 - protein, 9 aa, Hepatitis C Virus
VPESDAAAR

SEQ ID NO: 3171 - protein, 9 aa, Hepatitis C Virus
VTSTWVLVG

SEQ ID NO: 3172 - protein, 9 aa, Hepatitis C Virus
VVATDALMT

SEQ ID NO: 3173 - protein, 9 aa, Hepatitis C Virus
VVCAAILRR

SEQ ID NO: 3174 - protein, 9 aa, Hepatitis C Virus
VVGVVCAAI

SEQ ID NO: 3175 - protein, 9 aa, Hepatitis C Virus
VVLATATPP

SEQ ID NO: 3176 - protein, 9 aa, Hepatitis C Virus
VYCFTPSPV

SEQ ID NO: 3177 - protein, 9 aa, Hepatitis C Virus
WAGWLLSPR

SEQ ID NO: 3178 - protein, 9 aa, Hepatitis C Virus
WARMILMTH

SEQ ID NO: 3179 - protein, 9 aa, Hepatitis C Virus
WGADTAACG

SEQ ID NO: 3180 - protein, 9 aa, Hepatitis C Virus
WGPTDPRRR

SEQ ID NO: 3181 - protein, 9 aa, Hepatitis C Virus
WMNRLIAFA

SEQ ID NO: 3182 - protein, 9 aa, Hepatitis C Virus
WRLLAPITA

SEQ ID NO: 3183 - protein, 9 aa, Hepatitis C Virus
WTGALITPC

SEQ ID NO: 3184 - protein, 9 aa, Hepatitis C Virus
WYELTPAET

SEQ ID NO: 3185 - protein, 9 aa, Hepatitis C Virus
YATGNLPGC

SEQ ID NO: 3186 - protein, 9 aa, Hepatitis C Virus
YCFTPSPVV

SEQ ID NO: 3187 - protein, 9 aa, Hepatitis C Virus
YDAGCAWYE

SEQ ID NO: 3188 - protein, 9 aa, Hepatitis C Virus
YDIIICDEC

SEQ ID NO: 3189 - protein, 9 aa, Hepatitis C Virus
YDLELITSC

SEQ ID NO: 3190 - protein, 9 aa, Hepatitis C Virus
YGAGVAGAL

SEQ ID NO: 3191 - protein, 9 aa, Hepatitis C Virus
YGFQYSPGQ

SEQ ID NO: 3192 - protein, 9 aa, Hepatitis C Virus
YGKFLADGG

SEQ ID NO: 3193 - protein, 9 aa, Hepatitis C Virus
YKVLVLNPS

SEQ ID NO: 3194 - protein, 9 aa, Hepatitis C Virus
YLAGLSTLP

SEQ ID NO: 3195 - protein, 9 aa, Hepatitis C Virus
YLKGSSGGP

SEQ ID NO: 3196 - protein, 9 aa, Hepatitis C Virus
YLTRDPTTP

SEQ ID NO: 3197 - protein, 9 aa, Hepatitis C Virus
YQATVCARA

SEQ ID NO: 3198 - protein, 9 aa, Hepatitis C Virus
YRGLDVSVI

SEQ ID NO: 3199 - protein, 9 aa, Hepatitis C Virus
YRLGAVQNE

SEQ ID NO: 3200 - protein, 9 aa, Hepatitis C Virus
YRRCRASGV

SEQ ID NO: 3201 - protein, 9 aa, Hepatitis C Virus
YSIEPLDLP

SEQ ID NO: 3202 - protein, 9 aa, Hepatitis C Virus
YSPGEINRV

SEQ ID NO: 3203 - protein, 9 aa, Hepatitis C Virus
YVGDLCGSV

SEQ ID NO: 3204 - protein, 9 aa, Hepatitis C Virus
VGIYLLPNR

SEQ ID NO: 3205 - protein, 9 aa, Hepatitis C Virus
FLADGGCSG

SEQ ID NO: 3206 - protein, 9 aa, Hepatitis C Virus
FSLDPTFTI

SEQ ID NO: 3207 - protein, 9 aa, Hepatitis C Virus
LEGEPGDPD

SEQ ID NO: 3208 - protein, 9 aa, Hepatitis C Virus
LPCEPEPDV

SEQ ID NO: 3209 - protein, 9 aa, Hepatitis C Virus
MAWDMMMNW

SEQ ID NO: 3210 - protein, 9 aa, Hepatitis C Virus
MLTDPSHIT

SEQ ID NO: 3211 - protein, 9 aa, Hepatitis C Virus
MSADLEVVT

SEQ ID NO: 3212 - protein, 9 aa, Hepatitis C Virus
VATDALMTG

SEQ ID NO: 3213 - protein, 9 aa, Hepatitis C Virus
VCQDHLEFW

SEQ ID NO: 3214 - protein, 9 aa, Hepatitis C Virus
VFPDLGVRV

SEQ ID NO: 3215 - protein, 9 aa, Hepatitis C Virus
VFTDNSSPP

SEQ ID NO: 3216 - protein, 9 aa, Hepatitis C Virus
VLCECYDAG

SEQ ID NO: 3217 - protein, 9 aa, Hepatitis C Virus
VLEDGVNYA

SEQ ID NO: 3218 - protein, 9 aa, Hepatitis C Virus
VLVDILAGY

SEQ ID NO: 3219 - protein, 9 aa, Hepatitis C Virus
VQPEKGGRK

SEQ ID NO: 3220 - protein, 9 aa, Hepatitis C Virus
YDLELITSC

SEQ ID NO: 3221 - protein, 9 aa, Hepatitis C Virus
YSIEPLDLP

SEQ ID NO: 3222 - protein, 9 aa, Hepatitis C Virus
YVGDLCGSV

SEQ ID NO: 3223 - protein, 9 aa, Hepatitis C Virus
YVPESDAAA

SEQ ID NO: 3224 - protein, 15 aa, Hepatitis C Virus
YGKFLADGGCSGGAY

SEQ ID NO: 3225 - protein, 15 aa, Hepatitis C Virus
TVDFSLDPTFTIETT

SEQ ID NO: 3226 - protein, 15 aa, Hepatitis C Virus
MPPLEGEPGDPDLSD

SEQ ID NO: 3227 - protein, 15 aa, Hepatitis C Virus
GSQLPCEPEPDVAVL

SEQ ID NO: 3228 - protein, 15 aa, Hepatitis C Virus
GHRMAWDMMMNWSPT

SEQ ID NO: 3229 - protein, 15 aa, Hepatitis C Virus
LTSMLTDPSHITAET

SEQ ID NO: 3230 - protein, 15 aa, Hepatitis C Virus
MACMSADLEVVTSTW

SEQ ID NO: 3231 - protein, 15 aa, Hepatitis C Virus
VVVVATDALMTGYTG

SEQ ID NO: 3232 - protein, 15 aa, Hepatitis C Virus
GLPVCQDHLEFWESV

SEQ ID NO: 3233 - protein, 15 aa, Hepatitis C Virus
RLIVFPDLGVRVCEK

SEQ ID NO: 3234 - protein, 15 aa, Hepatitis C Virus
RSPVFTDNSSPPAVP

SEQ ID NO: 3235 - protein, 15 aa, Hepatitis C Virus
DSSVLCECYDAGCAW

SEQ ID NO: 3236 - protein, 15 aa, Hepatitis C Virus
GVRVLEDGVNYATGN

SEQ ID NO: 3237 - protein, 15 aa, Hepatitis C Virus
LGKVLVDILAGYGAG

SEQ ID NO: 3238 - protein, 15 aa, Hepatitis C Virus
VFCVQPEKGGRKPAR

SEQ ID NO: 3239 - protein, 15 aa, Hepatitis C Virus
QPEYDLELITSCSSN

SEQ ID NO: 3240 - protein, 15 aa, Hepatitis C Virus
GACYSIEPLDLPQII

SEQ ID NO: 3241 - protein, 15 aa, Hepatitis C Virus
SAMYVGDLCGSVFLV

SEQ ID NO: 3242 - protein, 15 aa, Hepatitis C Virus
PTHYVPESDAAARVT

SEQ ID NO: 3243 - protein, 9 aa, Hepatitis C Virus
FCHSKKKCD

SEQ ID NO: 3244 - protein, 9 aa, Hepatitis C Virus
FSYDTRCFD

SEQ ID NO: 3245 - protein, 9 aa, Hepatitis C Virus
LAEQFKQKA

SEQ ID NO: 3246 - protein, 9 aa, Hepatitis C Virus
LKPTLHGPT

SEQ ID NO: 3247 - protein, 9 aa, Hepatitis C Virus
VRATRKTSE

SEQ ID NO: 3248 - protein, 9 aa, Hepatitis C Virus
YLVTRHADV

SEQ ID NO: 3249 - protein, 9 aa, Hepatitis C Virus
MSTNPKPQR

SEQ ID NO: 3250 - protein, 15 aa, Hepatitis C Virus
HLIFCHSKKKCDELA

SEQ ID NO: 3251 - protein, 15 aa, Hepatitis C Virus
PMGFSYDTRCFDSTV

SEQ ID NO: 3252 - protein, 15 aa, Hepatitis C Virus
GMQLAEQFKQKALGL

SEQ ID NO: 3253 - protein, 15 aa, Hepatitis C Virus
LIRLKPTLHGPTPLL

SEQ ID NO: 3254 - protein, 15 aa, Hepatitis C Virus
RLGVRATRKTSERSQ

SEQ ID NO: 3255 - protein, 15 aa, Hepatitis C Virus
SDLYLVTRHADVIPV

SEQ ID NO: 3256 - protein, 10 aa, Hepatitis C Virus
LLFNILGGWV

SEQ ID NO: 3257 - protein, 9 aa, Hepatitis C Virus
FLLLADARV

SEQ ID NO: 3258 - protein, 9 aa, Hepatitis C Virus
YLVAYQATV

SEQ ID NO: 3259 - protein, 10 aa, Hepatitis C Virus
RLIVFPDLGV

SEQ ID NO: 3260 - protein, 9 aa, Hepatitis C Virus
DLMGYIPLV

SEQ ID NO: 3261 - protein, 9 aa, Hepatitis C Virus
WMNRLIAFA

SEQ ID NO: 3262 - protein, 9 aa, Hepatitis C Virus
VLVGGVLAA

SEQ ID NO: 3263 - protein, 9 aa, Hepatitis C Virus
HMWNFISGI

SEQ ID NO: 3264 - protein, 9 aa, Hepatitis C Virus
ILAGYGAGV

SEQ ID NO: 3265 - protein, 10 aa, Hepatitis C Virus
YLLPRRGPRL

SEQ ID NO: 3266 - protein, 9 aa, Hepatitis C Virus
LLFLLLADA

SEQ ID NO: 3267 - protein, 9 aa, Hepatitis C Virus
YLVTRHADV

SEQ ID NO: 3268 - protein, 9 aa, Hepatitis C Virus
KTSERSQPR

SEQ ID NO: 3269 - protein, 9 aa, Hepatitis C Virus
RLGVRATRK

SEQ ID NO: 3270 - protein, 9 aa, Hepatitis C Virus
QLFTFSPRR

SEQ ID NO: 3271 - protein, 10 aa, Hepatitis C Virus
RMYVGGVEHR

SEQ ID NO: 3272 - protein, 9 aa, Hepatitis C Virus
LIFCHSKKK

SEQ ID NO: 3273 - protein, 10 aa, Hepatitis C Virus
GVAGALVAFK

SEQ ID NO: 3274 - protein, 9 aa, Hepatitis C Virus
VAGALVAFK

SEQ ID NO: 3275 - protein, 10 aa, Hepatitis C Virus
TLGFGAYMSK

SEQ ID NO: 3276 - protein, 9 aa, Hepatitis C Virus
LPGCSFSIF

SEQ ID NO: 3277 - protein, 9 aa, Homo sapiens
YTAVVPLVY

SEQ ID NO: 3278 - protein, 10 aa, Artificial Sequence
  HBVc 18-27 F6->Y
FLPSDYFPSV

SEQ ID NO: 3279 - protein, 10 aa, Artificial Sequence
  HBVc 18-27 F6->Y
FLPSDYFPSV

SEQ ID NO: 3280 - protein, 10 aa, Artificial Sequence
  HBVc 18-27 F6->Y
FLPSDYFPSV

SEQ ID NO: 3281 - protein, 10 aa, Artificial Sequence
  HBVc 18-27 F6->Y
FLPSDYFPSV

SEQ ID NO: 3282 - protein, 10 aa, Artificial Sequence
  HBVc 18-27 F6->Y
FLPSDYFPSV

SEQ ID NO: 3283 - protein, 10 aa, Artificial Sequence
  A3CON1
KVFPYALINK

SEQ ID NO: 3284 - protein, 10 aa, Artificial Sequence
  A3CON1
KVFPYALINK

SEQ ID NO: 3285 - protein, 9 aa, Artificial Sequence
  A24CON1
AYIDNYNKF

SEQ ID NO: 3286 - protein, 10 aa, Artificial Sequence
  A3CON1
KVFPYALINK

SEQ ID NO: 3287 - protein, 10 aa, Artificial Sequence
  A3CON1
KVFPYALINK

SEQ ID NO: 3288 - protein, 11 aa, Artificial Sequence
  HBVc 141-151 T7->Y
STLPETYVVRR

SEQ ID NO: 3289 - protein, 9 aa, Artificial Sequence
  HBV pol 646-654 C4->A
FTQAGYPAL

SEQ ID NO: 3290 - protein, 9 aa, Artificial Sequence
  A2 sigal seq. 5-13 (L7->Y)
APRTLVYLL

SEQ ID NO: 3291 - protein, 8 aa, Artificial Sequence
  HIV gp 586-593 Y1->F, Q5->Y
FLKDYQLL

SEQ ID NO: 3292 - protein, 9 aa, Artificial Sequence
  R 60s
FRYNGLIHR

SEQ ID NO: 3293 - protein, 9 aa, Artificial Sequence
  B35CON2
FPFKYAAAF

SEQ ID NO: 3294 - protein, 9 aa, Artificial Sequence
  B35CON2
FPFKYAAAF

SEQ ID NO: 3295 - protein, 9 aa, Artificial Sequence
  B35CON2
FPFKYAAAF

SEQ ID NO: 3296 - protein, 9 aa, Artificial Sequence
  EF-1 G6->Y
AEMGKYSFY

SEQ ID NO: 3297 - protein, 9 aa, Artificial Sequence
  B35CON2
FPFKYAAAF

SEQ ID NO: 3298 - protein, 9 aa, Artificial Sequence
  B35CON2
FPFKYAAAF

SEQ ID NO: 3299 - protein, 9 aa, Artificial Sequence
  B35CON2
FPFKYAAAF

SEQ ID NO: 3300 - protein, 9 aa, Artificial Sequence
  C4CON1
QYDDAVYKL

SEQ ID NO: 3301 - protein, 9 aa, Artificial Sequence
  C6CON1
YRHDGGNVL

SEQ ID NO: 3302 - protein, 9 aa, Artificial Sequence
  C6CON1
YRHDGGNVL

SEQ ID NO: 3303 - protein, 10 aa, Artificial Sequence
  Adenovirus E1A P7->Y
SGPSNTYPEI

SEQ ID NO: 3304 - protein, 8 aa, Artificial Sequence
  VSV NP 52-59
RGYVFQGL

SEQ ID NO: 3305 - protein, 10 aa, Artificial Sequence
  HIV-IIIB ENV G4->Y
RGPYRAFVTI

SEQ ID NO: 3306 - protein, 9 aa, Artificial Sequence
  KdCON1
KFNPMKTYI

SEQ ID NO: 3307 - protein, 12 aa, Artificial Sequence
  HBVs 28-39
IPQSLDSYWTSL

SEQ ID NO: 3308 - protein, 14 aa, Artificial Sequence
  HA Y307-319
YPKYVKQNTLKLAT

SEQ ID NO: 3309 - protein, 16 aa, Artificial Sequence
  MBP 88-102Y
VVHFFKNIVTPRTPPY

SEQ ID NO: 3310 - protein, 14 aa, Artificial Sequence
  760.16
YAAFAAAKTAAAFA

SEQ ID NO: 3311 - protein, 12 aa, Artificial Sequence
  MT 65kD Y3-13
YKTIAFDEEARR

SEQ ID NO: 3312 - protein, 14 aa, Artificial Sequence
  717.01
YARFQSQTTLKQKT

SEQ ID NO: 3313 - protein, 14 aa, Artificial Sequence
  717.10
YARFQRQTTLKAAA

SEQ ID NO: 3314 - protein, 14 aa, Artificial Sequence
  717.01
YARFQSQTTLKQKT

SEQ ID NO: 3315 - protein, 14 aa, Artificial Sequence
  717.01
YARFQSQTTLKQKT

SEQ ID NO: 3316 - protein, 14 aa, Artificial Sequence
  Tet. tox. 830-843
QYIKANSKFIGITE

SEQ ID NO: 3317 - protein, 14 aa, Artificial Sequence
  Tet. tox. 830-843
QYIKANSKFIGITE

SEQ ID NO: 3318 - protein, 14 aa, Artificial Sequence
  Tet. tox. 830-843
QYIKANSKFIGITE

SEQ ID NO: 3319 - protein, 14 aa, Artificial Sequence
  Tet. tox. 830-843
QYIKANSKFIGITE

SEQ ID NO: 3320 - protein, 14 aa, Artificial Sequence
  Tet. tox. 830-843
QYIKANSKFIGITE

SEQ ID NO: 3321 - protein, 15 aa, Artificial Sequence
  unknown eluted peptide
EALIHQLKINPYVLS

SEQ ID NO: 3322 - protein, 14 aa, Artificial Sequence
  Tet. tox. 830-843 S->A
QYIKANAKFIGITE

SEQ ID NO: 3323 - protein, 14 aa, Artificial Sequence
  Tet. tox. 830-843 S->A
QYIKANAKFIGITE

SEQ ID NO: 3324 - protein, 13 aa, Artificial Sequence
  HA 307-319
PKYVKQNTLKLAT

SEQ ID NO: 3325 - protein, 13 aa, Artificial Sequence
  Tet. tox. 1272-1284
NGQIGNDPNRDIL

SEQ ID NO: 3326 - protein, 14 aa, Artificial Sequence
  717.01
YARFQSQTTLKQKT

SEQ ID NO: 3327 - protein, 17 aa, Artificial Sequence
  ROIV
YAHAAHAAHAAHAAHAA

SEQ ID NO: 3328 - protein, 17 aa, Artificial Sequence
  ROIV
YAHAAHAAHAAHAAHAA

SEQ ID NO: 3329 - protein, 17 aa, Artificial Sequence
  ROIV
YAHAAHAAHAAHAAHAA

SEQ ID NO: 3330 - protein, 17 aa, Artificial Sequence
  HEL 46-61
YNTDGSTDYGILQINSR

SEQ ID NO: 3331 - protein, 17 aa, Artificial Sequence
  ROIV
YAHAAHAAHAAHAAHAA

SEQ ID NO: 3332 - protein, 17 aa, Artificial Sequence
  ROIV
YAHAAHAAHAAHAAHAA

SEQ ID NO: 3333 - protein, 16 aa, Artificial Sequence
  Lambda repressor 12-26
YLEDARRKKAIYEKKK

SEQ ID NO: 3334 - protein, 16 aa, Artificial Sequence
  Lambda repressor 12-26
YLEDARRKKAIYEKKK

SEQ ID NO: 3335 - protein, 10 aa, Hepatitis C Virus
LLFNILGGWV

SEQ ID NO: 3336 - protein, 9 aa, Hepatitis C Virus
FLLLADARV

SEQ ID NO: 3337 - protein, 9 aa, Hepatitis C Virus
YLVAYQATV

SEQ ID NO: 3338 - protein, 10 aa, Hepatitis C Virus
RLIVFPDLGV

SEQ ID NO: 3339 - protein, 9 aa, Hepatitis C Virus
DLMGYIPLV

SEQ ID NO: 3340 - protein, 9 aa, Hepatitis C Virus
WMNRLIAFA

SEQ ID NO: 3341 - protein, 9 aa, Hepatitis C Virus
VLVGGVLAA

SEQ ID NO: 3342 - protein, 9 aa, Hepatitis C Virus
HMWNFISGI

SEQ ID NO: 3343 - protein, 9 aa, Hepatitis C Virus
ILAGYGAGV

SEQ ID NO: 3344 - protein, 10 aa, Hepatitis C Virus
YLLPRRGPRL

SEQ ID NO: 3345 - protein, 9 aa, Hepatitis C Virus
LLFLLLADA

SEQ ID NO: 3346 - protein, 9 aa, Hepatitis C Virus
YLVTRHADV

SEQ ID NO: 3347 - protein, 9 aa, Hepatitis C Virus
ILSPGALVV

SEQ ID NO: 3348 - protein, 9 aa, Hepatitis C Virus
ALSTGLIHL

SEQ ID NO: 3349 - protein, 9 aa, Hepatitis C Virus
HLHQNIVDV

SEQ ID NO: 3350 - protein, 10 aa, Hepatitis C Virus
RLHGLSAFSL

SEQ ID NO: 3351-3363 - skipped (13 entries)

SEQ ID NO: 3364 - protein, 9 aa, Hepatitis C Virus
KTSERSQPR

SEQ ID NO: 3365 - protein, 9 aa, Hepatitis C Virus
RLGVRATRK

SEQ ID NO: 3366 - protein, 9 aa, Hepatitis C Virus
QLFTFSPRR

SEQ ID NO: 3367 - protein, 10 aa, Hepatitis C Virus
RMYVGGVEHR

SEQ ID NO: 3368 - protein, 9 aa, Hepatitis C Virus
LIFCHSKKK

SEQ ID NO: 3369 - protein, 10 aa, Hepatitis C Virus
GVAGALVAFK

SEQ ID NO: 3370 - protein, 9 aa, Hepatitis C Virus
VAGALVAFK

SEQ ID NO: 3371 - protein, 9 aa, Hepatitis C Virus
LGFGAYMSK

SEQ ID NO: 3372 - protein, 9 aa, Hepatitis C Virus
WMNSTGFTK

SEQ ID NO: 3373 - protein, 10 aa, Hepatitis C Virus
TLGFGAYMSK

SEQ ID NO: 3374 - protein, 9 aa, Hepatitis C Virus
AVCTRGVAK

SEQ ID NO: 3375 - protein, 9 aa, Hepatitis C Virus
EVFCVQPEK

SEQ ID NO: 3376 - protein, 10 aa, Hepatitis C Virus
AACNWTRGER

SEQ ID NO: 3377 - protein, 10 aa, Hepatitis C Virus
HLHAPTGSGK

SEQ ID NO: 3378 - protein, 10 aa, Hepatitis C Virus
HLIFCHSKKK

SEQ ID NO: 3379 - protein, 9 aa, Hepatitis C Virus
HLIFCHSKK

SEQ ID NO: 3380 - protein, 9 aa, Hepatitis C Virus
LPGCSFSIF

SEQ ID NO: 3381 - protein, 9 aa, Hepatitis C Virus
LPALSTGLI

SEQ ID NO: 3382 - protein, 10 aa, Hepatitis C Virus
KPTLHGPTPL

SEQ ID NO: 3383 - protein, 10 aa, Hepatitis C Virus
APTLWARMIL

SEQ ID NO: 3384 - protein, 9 aa, Hepatitis C Virus
SPRGSRPSW

SEQ ID NO: 3385 - protein, 9 aa, Hepatitis C Virus
QPRGRRQPI

SEQ ID NO: 3386 - protein, 10 aa, Hepatitis C Virus
LPRRGPRLGV

SEQ ID NO: 3387 - protein, 9 aa, Hepatitis C Virus
SPGQRVEFL

SEQ ID NO: 3388 - protein, 9 aa, Hepatitis C Virus
DPRRRSRNL

SEQ ID NO: 3389 - protein, 9 aa, Hepatitis C Virus
APTLWARMI

SEQ ID NO: 3390 - protein, 9 aa, Hepatitis C Virus
PPVVHGCPL

SEQ ID NO: 3391 - protein, 10 aa, Hepatitis C Virus
SPGALVVGVV

SEQ ID NO: 3392 - protein, 10 aa, Hepatitis C Virus
TPLLYRLGAV

SEQ ID NO: 3393 - protein, 8 aa, Hepatitis C Virus
IPFYGKAI

SEQ ID NO: 3394 - protein, 8 aa, Hepatitis C Virus
LPRRGPRL

SEQ ID NO: 3395 - protein, 8 aa, Hepatitis C Virus
IPLVGAPL

SEQ ID NO: 3396 - protein, 10 aa, Hepatitis C Virus
LPCSFTTLPA

SEQ ID NO: 3397 - protein, 8 aa, Hepatitis C Virus
LPGCSFSI

SEQ ID NO: 3398 - protein, 10 aa, Hepatitis C Virus
APLGGAARAL

SEQ ID NO: 3399 - protein, 8 aa, Hepatitis C Virus
APTLWARM

SEQ ID NO: 3400 - protein, 10 aa, Hepatitis C Virus
RPSGMFDSSV

SEQ ID NO: 3401 - protein, 10 aa, Hepatitis C Virus
LPINALSNSL

SEQ ID NO: 3402 - protein, 8 aa, Hepatitis C Virus
KPARLIVF

SEQ ID NO: 3403 - protein, 10 aa, Hepatitis C Virus
NPAIASLMAF

SEQ ID NO: 3404 - protein, 11 aa, Hepatitis C Virus
APTLWARMILM

SEQ ID NO: 3405 - protein, 8 aa, Hepatitis C Virus
LPYIEQGM

SEQ ID NO: 3406 - protein, 9 aa, Hepatitis C Virus
LPGCSFSIF

SEQ ID NO: 3407 - protein, 9 aa, Hepatitis C Virus
LPGCSFSII

SEQ ID NO: 3408 - protein, 9 aa, Hepatitis C Virus
FPGCSFSIF

SEQ ID NO: 3409 - protein, 9 aa, Hepatitis C Virus
LSAFSLHSY

SEQ ID NO: 3410 - protein, 10 aa, Hepatitis C Virus
GLSAFSLHSY

SEQ ID NO: 3411 - protein, 9 aa, Hepatitis C Virus
CTCGSSDLY

SEQ ID NO: 3412 - protein, 10 aa, Hepatitis C Virus
EVDGVRLHRY

SEQ ID NO: 3413 - protein, 9 aa, Hepatitis C Virus
KSTKVPAAY

SEQ ID NO: 3414 - protein, 9 aa, Hepatitis C Virus
CYDAGCAWY

SEQ ID NO: 3415 - protein, 9 aa, Hepatitis C Virus
DCSNSSIVY

SEQ ID NO: 3416 - protein, 10 aa, Hepatitis C Virus
TNSKGQNCGY

SEQ ID NO: 3417 - protein, 10 aa, Hepatitis C Virus
GKSTKVPAAY

SEQ ID NO: 3418 - protein, 10 aa, Hepatitis C Virus
TGAPITYSTY

SEQ ID NO: 3419 - protein, 10 aa, Hepatitis C Virus
VAATLGFGAY

SEQ ID NO: 3420 - protein, 10 aa, Hepatitis C Virus
VMGSSYGFQY

SEQ ID NO: 3421 - protein, 9 aa, Hepatitis C Virus
MGSSYGFQY

SEQ ID NO: 3422 - protein, 9 aa, Hepatitis C Virus
FWAKHMWNF

SEQ ID NO: 3423 - protein, 9 aa, Hepatitis C Virus
QYLAGLSTL

SEQ ID NO: 3424 - protein, 10 aa, Hepatitis C Virus
MYVGGVEHRL

SEQ ID NO: 3425 - protein, 9 aa, Hepatitis C Virus
TYSTYGKFL

SEQ ID NO: 3426 - protein, 10 aa, Hepatitis C Virus
QYSPGQRVEF

SEQ ID NO: 3427 - protein, 9 aa, Hepatitis C Virus
NFISGIQYL

SEQ ID NO: 3428 - protein, 10 aa, Hepatitis C Virus
GYIPLVGAPL

SEQ ID NO: 3429 - protein, 10 aa, Hepatitis C Virus
SFSIFLLALL

SEQ ID NO: 3430 - protein, 10 aa, Hepatitis C Virus
AYAAQGYKVL

SEQ ID NO: 3431 - protein, 10 aa, Hepatitis C Virus
GYGAGVAGAL

SEQ ID NO: 3432 - protein, 9 aa, Hepatitis C Virus
HMWNFISGI

SEQ ID NO: 3433 - protein, 10 aa, Hepatitis C Virus
RMAWDMMMNW

SEQ ID NO: 3434 - protein, 11 aa, Hepatitis C Virus
RMYVGGVEHRL

SEQ ID NO: 3435 - protein, 10 aa, Hepatitis C Virus
YYRGLDVSVI

SEQ ID NO: 3436 - protein, 10 aa, Hepatitis C Virus
DFSLDPTFTI

SEQ ID NO: 3437 - protein, 9 aa, Hepatitis C Virus
SWDQMWKCL

SEQ ID NO: 3438 - protein, 9 aa, Hepatitis C Virus
TWVLVGGVL

SEQ ID NO: 3439 - protein, 9 aa, Hepatitis C Virus
QFKQKALGL

SEQ ID NO: 3440 - protein, 10 aa, Hepatitis C Virus
QFKQKALGLL

SEQ ID NO: 3441 - protein, 10 aa, Hepatitis C Virus
FWAKHMWNFI

SEQ ID NO: 3442 - protein, 9 aa, Hepatitis C Virus
QWMNRLIAF

SEQ ID NO: 3443 - protein, 10 aa, Hepatitis C Virus
LWRQEMGGNI

SEQ ID NO: 3444 - protein, 9 aa, Hepatitis C Virus
GFSYDTRCF

SEQ ID NO: 3445 - protein, 9 aa, Hepatitis C Virus
RMILMTHFF

SEQ ID NO: 3446 - protein, 10 aa, Hepatitis C Virus
LLFNILGGWV

SEQ ID NO: 3447 - protein, 9 aa, Hepatitis C Virus
FLLLADARV

SEQ ID NO: 3448 - protein, 9 aa, Hepatitis C Virus
YLVAYQATV

SEQ ID NO: 3449 - protein, 10 aa, Hepatitis C Virus
RLIVFPDLGV

SEQ ID NO: 3450 - protein, 9 aa, Hepatitis C Virus
DLMGYIPLV

SEQ ID NO: 3451 - protein, 9 aa, Hepatitis C Virus
WMNRLIAFA

SEQ ID NO: 3452 - protein, 9 aa, Hepatitis C Virus
VLVGGVLAA

SEQ ID NO: 3453 - protein, 9 aa, Hepatitis C Virus
HMWNFISGI

SEQ ID NO: 3454 - protein, 9 aa, Hepatitis C Virus
ILAGYGAGV

SEQ ID NO: 3455 - protein, 10 aa, Hepatitis C Virus
YLLPRRGPRL

SEQ ID NO: 3456 - protein, 9 aa, Hepatitis C Virus
LLFLLLADA

SEQ ID NO: 3457 - protein, 9 aa, Hepatitis C Virus
YLVTRHADV

SEQ ID NO: 3458 - protein, 9 aa, Hepatitis C Virus
KTSERSQPR

SEQ ID NO: 3459 - protein, 9 aa, Hepatitis C Virus
RLGVRATRK

SEQ ID NO: 3460 - protein, 9 aa, Hepatitis C Virus
QLFTFSPRR

SEQ ID NO: 3461 - protein, 10 aa, Hepatitis C Virus
RMYVGGVEHR

SEQ ID NO: 3462 - protein, 9 aa, Hepatitis C Virus
LIFCHSKKK

SEQ ID NO: 3463 - protein, 10 aa, Hepatitis C Virus
GVAGALVAFK

SEQ ID NO: 3464 - protein, 9 aa, Hepatitis C Virus
VAGALVAFK

SEQ ID NO: 3465 - protein, 10 aa, Hepatitis C Virus
TLGFGAYMSK

SEQ ID NO: 3466 - protein, 15 aa, Hepatitis C Virus
VYLLPRRGPRLGVRA

SEQ ID NO: 3467 - protein, 16 aa, Hepatitis C Virus
GWLLSPRGSRPSWGPT

SEQ ID NO: 3468 - protein, 15 aa, Hepatitis C Virus
LGKVIDTLTCGFADL

SEQ ID NO: 3469 - protein, 15 aa, Hepatitis C Virus
IDTLTCGFADLMGYI

SEQ ID NO: 3470 - protein, 15 aa, Hepatitis C Virus
ADLMGYIPLVGAPLG

SEQ ID NO: 3471 - protein, 15 aa, Hepatitis C Virus
GVRVLEDGVNYATGN

SEQ ID NO: 3472 - protein, 15 aa, Hepatitis C Virus
GVNYATGNLPGCSFS

SEQ ID NO: 3473 - protein, 15 aa, Hepatitis C Virus
GCSFSIFLLALLSCL

SEQ ID NO: 3474 - protein, 15 aa, Hepatitis C Virus
GHRMAWDMMMNWSPT

SEQ ID NO: 3475 - protein, 15 aa, Hepatitis C Virus
CGPVYCFTPSPVVVG

SEQ ID NO: 3476 - protein, 15 aa, Hepatitis C Virus
VYCFTPSPVVVGTTD

SEQ ID NO: 3477 - protein, 15 aa, Hepatitis C Virus
GNWFGCTWMNSTGFT

SEQ ID NO: 3478 - protein, 15 aa, Hepatitis C Virus
FTTLPALSTGLIHLH

SEQ ID NO: 3479 - protein, 15 aa, Hepatitis C Virus
DLYLVTRHADVIPVR

SEQ ID NO: 3480 - protein, 15 aa, Hepatitis C Virus
RAAVCTRGVAKAVDF

SEQ ID NO: 3481 - protein, 15 aa, Hepatitis C Virus
AQGYKVLVLNPSVAA

SEQ ID NO: 3482 - protein, 15 aa, Hepatitis C Virus
GYKVLVLNPSVAATL

SEQ ID NO: 3483 - protein, 15 aa, Hepatitis C Virus
VLVLNPSVAATLGFG

SEQ ID NO: 3484 - protein, 15 aa, Hepatitis C Virus
GTVLDQAETAGARLV

SEQ ID NO: 3485 - protein, 15 aa, Hepatitis C Virus
GARLVVLATATPPGS

SEQ ID NO: 3486 - protein, 15 aa, Hepatitis C Virus
GRHLIFCHSKKKCDE

SEQ ID NO: 3487 - protein, 15 aa, Hepatitis C Virus
DSVIDCNTCVTQTVD

SEQ ID NO: 3488 - protein, 15 aa, Hepatitis C Virus
TVDFSLDPTFTIETT

SEQ ID NO: 3489 - protein, 15 aa, Hepatitis C Virus
FTGLTHIDAHFLSQT

SEQ ID NO: 3490 - protein, 15 aa, Hepatitis C Virus
YLVAYQATVCARAQA

SEQ ID NO: 3491 - protein, 15 aa, Hepatitis C Virus
KPTLHGPTPLLYRLG

SEQ ID NO: 3492 - protein, 15 aa, Hepatitis C Virus
LEVVTSTWVLVGGVL

SEQ ID NO: 3493 - protein, 15 aa, Hepatitis C Virus
TWVLVGGVLAALAAY

SEQ ID NO: 3494 - protein, 15 aa, Hepatitis C Virus
AEQFKQKALGLLQTA

SEQ ID NO: 3495 - protein, 16 aa, Hepatitis C Virus
PAILSPGALVVGVVCA

SEQ ID NO: 3496 - protein, 15 aa, Hepatitis C Virus
GALVVGVVCAAILRR

SEQ ID NO: 3497 - protein, 15 aa, Hepatitis C Virus
CAAILRRHVGPGEGA

SEQ ID NO: 3498 - protein, 15 aa, Hepatitis C Virus
AVQWMNRLIAFASRG

SEQ ID NO: 3499 - protein, 15 aa, Hepatitis C Virus
MNRLIAFASRGNHVS

SEQ ID NO: 3500 - protein, 15 aa, Hepatitis C Virus
ANLLWRQEMGGNITR

SEQ ID NO: 3501 - protein, 15 aa, Hepatitis C Virus
RQEMGGNITRVESEN

SEQ ID NO: 3502 - protein, 15 aa, Hepatitis C Virus
ARLIVFPDLGVRVCE

SEQ ID NO: 3503 - protein, 15 aa, Hepatitis C Virus
FPDLGVRVCEKMALY

SEQ ID NO: 3504 - protein, 15 aa, Hepatitis C Virus
GVRVCEKMALYDVVS

SEQ ID NO: 3505 - protein, 15 aa, Hepatitis C Virus
QPEYDLELITSCSSN

SEQ ID NO: 3506 - protein, 15 aa, Hepatitis C Virus
LELITSCSSNVSVAH

SEQ ID NO: 3507 - protein, 15 aa, Hepatitis C Virus
PTLWARMILMTHFFS

SEQ ID NO: 3508 - protein, 15 aa, Hepatitis C Virus
LHGLSAFSLHSYSPG

SEQ ID NO: 3509 - protein, 15 aa, Hepatitis C Virus
AFSLHSYSPGEINRV

SEQ ID NO: 3510 - protein, 15 aa, Hepatitis C Virus
VVLLFLLLADARVCS

SEQ ID NO: 3511 - protein, 15 aa, Hepatitis C Virus
SKGWRLLAPITAYAQ

SEQ ID NO: 3512 - protein, 15 aa, Hepatitis C Virus
PQTFQVAHLHAPTGS

SEQ ID NO: 3513 - protein, 15 aa, Hepatitis C Virus
DVVVVATDALMTGYT

SEQ ID NO: 3514 - protein, 15 aa, Hepatitis C Virus
WESVFTGLTHIDAHF

SEQ ID NO: 3515 - protein, 15 aa, Hepatitis C Virus
LTSMLTDPSHITAET

SEQ ID NO: 3516 - protein, 15 aa, Hepatitis C Virus
ASQLSAPSLKATCTT

SEQ ID NO: 3517 - protein, 15 aa, Hepatitis C Virus
DADLIEANLLWRQEM

SEQ ID NO: 3518 - protein, 15 aa, Hepatitis C Virus
SYTWTGALITPCAAE

SEQ ID NO: 3519 - protein, 15 aa, Hepatitis C Virus
TTIMAKNEVFCVQPE

SEQ ID NO: 3520 - protein, 15 aa, Hepatitis C Virus
GSSYGFQYSPGQRVE

SEQ ID NO: 3521 - protein, 15 aa, Hepatitis C Virus
ASCLRKLGVPPLRVW

SEQ ID NO: 3522 - protein, 20 aa, Hepatitis C Virus
AAYAAQGYKVLVLNPSVAAT

SEQ ID NO: 3523 - protein, 20 aa, Hepatitis C Virus
GYKVLVLNPSVAATLGFGAY

SEQ ID NO: 3524 - protein, 14 aa, Hepatitis C Virus
GYKVLVLNPSVAAT

SEQ ID NO: 3525 - protein, 19 aa, Hepatitis C Virus
RRPQDVKFPGGGQIVGGVY

SEQ ID NO: 3526 - protein, 20 aa, Hepatitis C Virus
DVKFPGGGQIVGGVYLLPRR

SEQ ID NO: 3527 - protein, 20 aa, Hepatitis C Virus
GYKVLVLNPSVAATLGFGAY

SEQ ID NO: 3528 - protein, 20 aa, Hepatitis C Virus
TLHGPTPLLYRLGAVQNEIT

SEQ ID NO: 3529 - protein, 20 aa, Hepatitis C Virus
NFISGIQYLAGLSTLPGNPA

SEQ ID NO: 3530 - protein, 20 aa, Hepatitis C Virus
LLFNILGGWVAAQLAAPGAA

SEQ ID NO: 3531 - protein, 20 aa, Hepatitis C Virus
GPGEGAVQWMNRLIAFASRG

SEQ ID NO: 3532 - protein, 21 aa, Hepatitis C Virus
GEGAVQWMNRLIAFASRGNHV

SEQ ID NO: 3533 - protein, 20 aa, Hepatitis C Virus
AIPLEVIKGGRHLIFCHSKR

SEQ ID NO: 3534 - protein, 20 aa, Hepatitis C Virus
GRHLIFCHSKRKCDELATKL

SEQ ID NO: 3535 - protein, 20 aa, Hepatitis C Virus
SVIDCNTCVTQTVDFSLDPT

SEQ ID NO: 3536 - protein, 15 aa, Hepatitis C Virus
GVRVLEDGVNYATGN

SEQ ID NO: 3537 - protein, 15 aa, Hepatitis C Virus
SAMYVGDLCGSVFLV

SEQ ID NO: 3538 - protein, 15 aa, Hepatitis C Virus
GHRMAWDMMMNWSPT

SEQ ID NO: 3539 - protein, 15 aa, Hepatitis C Virus
SDLYLVTRHADVIPV

SEQ ID NO: 3540 - protein, 15 aa, Hepatitis C Virus
VVVVATDALMTGYTG

SEQ ID NO: 3541 - protein, 15 aa, Hepatitis C Virus
TVDFSLDPTFTIETT

SEQ ID NO: 3542 - protein, 15 aa, Hepatitis C Virus
DSSVLCECYDAGCAW

SEQ ID NO: 3543 - protein, 15 aa, Hepatitis C Virus
GLPVCQDHLEFWESV

SEQ ID NO: 3544 - protein, 15 aa, Hepatitis C Virus
GMQLAEQFKQKALGL

SEQ ID NO: 3545 - protein, 15 aa, Hepatitis C Virus
PTHYVPESDAAARVT

SEQ ID NO: 3546 - protein, 15 aa, Hepatitis C Virus
GSQLPCEPEPDVAVL

SEQ ID NO: 3547 - protein, 15 aa, Hepatitis C Virus
LTSMLTDPSHITAET

SEQ ID NO: 3548 - protein, 15 aa, Hepatitis C Virus
MPPLEGEPGDPDLSD

SEQ ID NO: 3549 - protein, 15 aa, Hepatitis C Virus
QPEYDLELITSCSSN

SEQ ID NO: 3550 - protein, 15 aa, Hepatitis C Virus
GRHLIFCHSKKKCDE

SEQ ID NO: 3551 - protein, 26 aa, Hepatitis C Virus
AAYAAQGYKVLVLNPSVAATLGFGAY

SEQ ID NO: 3552 - protein, 15 aa, Hepatitis C Virus
GYKVLVLNPSVAATL

SEQ ID NO: 3553 - protein, 15 aa, Hepatitis C Virus
AQGYKVLVLNPSVAA

SEQ ID NO: 3554 - protein, 20 aa, Hepatitis C Virus
AAYAAQGYKVLVLNPSVAAT

SEQ ID NO: 3555 - protein, 14 aa, Hepatitis C Virus
GYKVLVLNPSVAAT

SEQ ID NO: 3556 - protein, 20 aa, Hepatitis C Virus
GYKVLVLNPSVAATLGFGAY

SEQ ID NO: 3557 - protein, 22 aa, Hepatitis C Virus
GEGAVQWMNRLIAFASRGNHVS

SEQ ID NO: 3558 - protein, 15 aa, Hepatitis C Virus
MNRLIAFASRGNHVS

SEQ ID NO: 3559 - protein, 21 aa, Hepatitis C Virus
GEGAVQWMNRLIAFASRGNHV

SEQ ID NO: 3560 - protein, 15 aa, Hepatitis C Virus
SKGWRLLAPITAYAQ

SEQ ID NO: 3561 - protein, 15 aa, Hepatitis C Virus
GSSYGFQYSPGQRVE

SEQ ID NO: 3562 - protein, 15 aa, Hepatitis C Virus
ASCLRKLGVPPLRVW

SEQ ID NO: 3563 - protein, 20 aa, Hepatitis C Virus
NFISGIQYLAGLSTLPGNPA

SEQ ID NO: 3564 - protein, 15 aa, Hepatitis C Virus
VVVVATDALMTGYTG

SEQ ID NO: 3565 - protein, 15 aa, Hepatitis C Virus
TVDFSLDPTFTIETT

SEQ ID NO: 3566 - protein, 15 aa, Hepatitis C Virus
GRHLIFCHSKKKCDE

SEQ ID NO: 3567 - protein, 10 aa, Hepatitis C Virus
LLFNILGGWV

SEQ ID NO: 3568 - protein, 9 aa, Hepatitis C Virus
FLLLADARV

SEQ ID NO: 3569 - protein, 9 aa, Hepatitis C Virus
YLVAYQATV

SEQ ID NO: 3570 - protein, 10 aa, Hepatitis C Virus
RLIVFPDLGV

SEQ ID NO: 3571 - protein, 9 aa, Hepatitis C Virus
DLMGYIPLV

SEQ ID NO: 3572 - protein, 9 aa, Hepatitis C Virus
WMNRLIAFA

SEQ ID NO: 3573 - protein, 9 aa, Hepatitis C Virus
VLVGGVLAA

SEQ ID NO: 3574 - protein, 9 aa, Hepatitis C Virus
HMWNFISGI

SEQ ID NO: 3575 - protein, 9 aa, Hepatitis C Virus
ILAGYGAGV

SEQ ID NO: 3576 - protein, 10 aa, Hepatitis C Virus
YLLPRRGPRL

SEQ ID NO: 3577 - protein, 9 aa, Hepatitis C Virus
LLFLLLADA

SEQ ID NO: 3578 - protein, 9 aa, Hepatitis C Virus
YLVTRHADV

SEQ ID NO: 3579 - protein, 9 aa, Hepatitis C Virus
KTSERSQPR

SEQ ID NO: 3580 - protein, 9 aa, Hepatitis C Virus
RLGVRATRK

SEQ ID NO: 3581 - protein, 9 aa, Hepatitis C Virus
QLFTFSPRR

SEQ ID NO: 3582 - protein, 10 aa, Hepatitis C Virus
RMYVGGVEHR

SEQ ID NO: 3583 - protein, 9 aa, Hepatitis C Virus
LIFCHSKKK

SEQ ID NO: 3584 - protein, 10 aa, Hepatitis C Virus
GVAGALVAFK

SEQ ID NO: 3585 - protein, 9 aa, Hepatitis C Virus
VAGALVAFK

SEQ ID NO: 3586 - protein, 10 aa, Hepatitis C Virus
TLGFGAYMSK

SEQ ID NO: 3587 - protein, 9 aa, Hepatitis C Virus
VGIYLLPNR

SEQ ID NO: 3588 - protein, 9 aa, Hepatitis C Virus
LPGCSFSIF

SEQ ID NO: 3589 - protein, 8 aa, Hepatitis C Virus
IPFYGKAI

SEQ ID NO: 3590 - protein, 9 aa, Hepatitis C Virus
LSAFSLHSY

SEQ ID NO: 3591 - protein, 9 aa, Hepatitis C Virus
CTCGSSDLY

SEQ ID NO: 3592 - protein, 9 aa, Hepatitis C Virus
FWAKHMWNF

SEQ ID NO: 3593 - protein, 15 aa, Hepatitis C Virus
SKGWRLLAPITAYAQ

SEQ ID NO: 3594 - protein, 20 aa, Hepatitis C Virus
AAYAAQGYKVLVLNPSVAAT

SEQ ID NO: 3595 - protein, 15 aa, Hepatitis C Virus
GRHLIFCHSKKKCDE

SEQ ID NO: 3596 - protein, 15 aa, Hepatitis C Virus
VVVVATDALMTGYTG

SEQ ID NO: 3597 - protein, 15 aa, Hepatitis C Virus
TVDFSLDPTFTIETT

SEQ ID NO: 3598 - protein, 20 aa, Hepatitis C Virus
NFISGIQYLAGLSTLPGNPA

SEQ ID NO: 3599 - protein, 21 aa, Hepatitis C Virus
GEGAVQWMNRLIAFASRGNHV

SEQ ID NO: 3600 - protein, 15 aa, Hepatitis C Virus
GSSYGFQYSPGQRVE

SEQ ID NO: 3601 - protein, 15 aa, Hepatitis C Virus
ASCLRKLGVPPLRVW

SEQ ID NO: 3602 - protein, 14 aa, Clostridium tetanii
QYIKANSKFIGITE

SEQ ID NO: 3603 - protein, 21 aa, Plasmodium falciparum
DIEKKIAKMEKASSVFNVVNS

SEQ ID NO: 3604 - protein, 16 aa, Streptococcus aureus
GAVDSILGGVATYGAA

SEQ ID NO: 3605 - protein, 13 aa, Artificial Sequence
  pan-DR-epitope peptide
  misc_feature (1)..(1): Xaa is D-alanine or L-alanine
  misc_feature (3)..(3): Xaa is cyclohexylalanine, Phe or Tyr
  misc_feature (13)..(13): Xaa is D-alanine or L-alanine
XKXVWANTLKAAX

SEQ ID NO: 3606 - protein, 9 aa, Artificial Sequence
  Standard Peptide 944.02
YLEPAIAKY

SEQ ID NO: 3607 - protein, 10 aa, Artificial Sequence
  Standard Peptide 944.01
FLPSDYFPSV

SEQ ID NO: 3608 - protein, 10 aa, Artificial Sequence
  Standard Peptide 944.01
FLPSDYFPSV

SEQ ID NO: 3609 - protein, 10 aa, Artificial Sequence
  Standard Peptide 944.01
FLPSDYFPSV

SEQ ID NO: 3610 - protein, 10 aa, Artificial Sequence
  Standard Peptide 944.01
FLPSDYFPSV

SEQ ID NO: 3611 - protein, 10 aa, Artificial Sequence
  Standard Peptide 944.01
FLPSDYFPSV

SEQ ID NO: 3612 - protein, 10 aa, Artificial Sequence
  Standard Peptide 944.01
FLPSDYFPSV

SEQ ID NO: 3613 - protein, 9 aa, Artificial Sequence
  Standard Peptide 1072.34
FTQAGYPAL

SEQ ID NO: 3614 - protein, 10 aa, Artificial Sequence
  Standard Peptide 941.12
KVFPYALINK

SEQ ID NO: 3615 - protein, 9 aa, Artificial Sequence
  Standard Peptide 940.06
AVDLYHFLK

SEQ ID NO: 3616 - protein, 10 aa, Artificial Sequence
  Standard Peptide 941.12
KVFPYALINK

SEQ ID NO: 3617 - protein, 11 aa, Artificial Sequence
  Standard Peptide 1083.02
STLPETYVVRR

SEQ ID NO: 3618 - protein, 10 aa, Artificial Sequence
  Standard Peptide 941.12
KVFPYALINK

SEQ ID NO: 3619 - protein, 9 aa, Artificial Sequence
  Standard Peptide 979.02
AYIDNYNKF

SEQ ID NO: 3620 - protein, 9 aa, Artificial Sequence
  Standard Peptide 1075.23
APRTLVYLL

SEQ ID NO: 3621 - protein, 9 aa, Artificial Sequence
  Standard Peptide 1021.05
FPFKYAAAF

SEQ ID NO: 3622 - protein, 9 aa, Artificial Sequence
  Standard Peptide 1021.05
FPFKYAAAF

SEQ ID NO: 3623 - protein, 9 aa, Artificial Sequence
  Standard Peptide 1021.05
FPFKYAAAF

SEQ ID NO: 3624 - protein, 9 aa, Artificial Sequence
  Standard Peptide 1021.05
FPFKYAAAF

SEQ ID NO: 3625 - protein, 13 aa, Artificial Sequence
  Standard Peptide 515.01
PKYVKQNTLKLAT

SEQ ID NO: 3626 - protein, 12 aa, Artificial Sequence
  Standard Peptide 829.02
YKTIAFDEEARR

SEQ ID NO: 3627 - protein, 13 aa, Artificial Sequence
  Standard Peptide 515.01
PKYVKQNTLKLAT

SEQ ID NO: 3628 - protein, 14 aa, Artificial Sequence
  Standard Peptide 717.01
YARFQSQTTLKQKT

SEQ ID NO: 3629 - protein, 14 aa, Artificial Sequence
  Standard Peptide 717.01
YARFQSQTTLKQKT

SEQ ID NO: 3630 - protein, 14 aa, Artificial Sequence
  Standard Peptide 553.01
QYIKANSKFIGITE

SEQ ID NO: 3631 - protein, 14 aa, Artificial Sequence
  Standard Peptide 553.01
QYIKANSKFIGITE

SEQ ID NO: 3632 - protein, 14 aa, Artificial Sequence
  Standard Peptide 553.01
QYIKANSKFIGITE

SEQ ID NO: 3633 - protein, 14 aa, Artificial Sequence
  Standard Peptide 553.01
QYIKANSKFIGITE

SEQ ID NO: 3634 - protein, 14 aa, Artificial Sequence
  Standard Peptide 553.01
QYIKANSKFIGITE

SEQ ID NO: 3635 - protein, 15 aa, Artificial Sequence
  Standard Peptide 1200.05
EALIHQLKINPYVLS

SEQ ID NO: 3636 - protein, 14 aa, Artificial Sequence
  Standard Peptide 650.22
KYIKANAKFIGITE

SEQ ID NO: 3637 - protein, 24 aa, Artificial Sequence
  Standard Peptide 507.02
GRTQDENPVVHFFKNIVTPRTPPP

SEQ ID NO: 3638 - protein, 13 aa, Artificial Sequence
  Standard Peptide 511
NGQIGNDPNRDIL

SEQ ID NO: 3639 - protein, 14 aa, Artificial Sequence
  Standard Peptide 717.01
YARFQSQTTLKQKT

SEQ ID NO: 3640 - protein, 14 aa, Artificial Sequence
  Standard Peptide 553.01
QYIKANSKFIGITE

SEQ ID NO: 3641 - protein, 16 aa, Hepatitis C Virus
GQIVGGVYLLPRRGPR

SEQ ID NO: 3642 - protein, 9 aa, Artificial Sequence
  HCV analog
  misc_feature (3)..(3): Xaa is any amino acid
RVXEKMALY

SEQ ID NO: 3643 - protein, 9 aa, Artificial Sequence
  HCV analog
  misc_feature (3)..(3): Xaa is any amino acid
AVXTRGVAK

SEQ ID NO: 3644 - protein, 9 aa, Artificial Sequence
  HCV analog
  misc_feature (4)..(4): Xaa is any amino acid
EVFXVQPEK

SEQ ID NO: 3645 - protein, 9 aa, Artificial Sequence
  HCV analog
  misc_feature (5)..(5): Xaa is any amino acid
HLIFXHSKK

SEQ ID NO: 3646 - protein, 9 aa, Artificial Sequence
  HCV analog
  misc_feature (4)..(4): Xaa is any amino acid
LPGXSFSIF

SEQ ID NO: 3647 - protein, 9 aa, Artificial Sequence
  HCV analog
  misc_feature (4)..(4): Xaa is any amino acid
LIFXHSKKK

SEQ ID NO: 3648 - protein, 10 aa, Artificial Sequence
  HCV analog
  misc_feature (9)..(9): Xaa is any amino acid
VLAALAAYXL

SEQ ID NO: 3649 - protein, 10 aa, Artificial Sequence
  HCV analog
  misc_feature (5)..(5): Xaa is any amino acid
HLIFXHSKKK

SEQ ID NO: 3650 - protein, 10 aa, Artificial Sequence
  HCV analog
  misc_feature (3)..(3): Xaa is any amino acid
AAXNWTRGER

SEQ ID NO: 3651 - protein, 10 aa, Artificial Sequence
  HCV analog
YLLPRRGPRV

SEQ ID NO: 3652 - protein, 9 aa, Artificial Sequence
  HCV analog
FPGCSFSIF

SEQ ID NO: 3653 - protein, 9 aa, Artificial Sequence
  HCV analog
LPVCSFSIF

SEQ ID NO: 3654 - protein, 9 aa, Artificial Sequence
  HCV analog
LPGCSFSYF

SEQ ID NO: 3655 - protein, 9 aa, Artificial Sequence
  HCV analog
LPGCMFSIF

SEQ ID NO: 3656 - protein, 9 aa, Artificial Sequence
  HCV analog
LPFCSFSIF

SEQ ID NO: 3657 - protein, 9 aa, Artificial Sequence
  HCV analog
LPGCSFSPF

SEQ ID NO: 3658 - protein, 9 aa, Artificial Sequence
  HCV analog
LPGCSFSII

SEQ ID NO: 3659 - protein, 9 aa, Artificial Sequence
  HCV analog
PPVVHGCPI

SEQ ID NO: 3660 - protein, 10 aa, Artificial Sequence
  HCV analog
KPTLHGPTPI

SEQ ID NO: 3661 - protein, 10 aa, Artificial Sequence
  HCV analog
APTLWARMII

SEQ ID NO: 3662 - protein, 9 aa, Artificial Sequence
  HCV analog
SPRGSRPSI

SEQ ID NO: 3663 - protein, 10 aa, Artificial Sequence
  HCV analog
LPRRGPRLGI

SEQ ID NO: 3664 - protein, 9 aa, Artificial Sequence
  HCV analog
SPGQRVEFI

SEQ ID NO: 3665 - protein, 9 aa, Artificial Sequence
  HCV analog
LPGCSFSII

SEQ ID NO: 3666 - protein, 9 aa, Artificial Sequence
  HCV analog
DPRRRSRNI

SEQ ID NO: 3667 - protein, 10 aa, Artificial Sequence
  HCV analog
SPGALVVGVI

SEQ ID NO: 3668 - protein, 10 aa, Artificial Sequence
  HCV analog
TPLLYRLGAI

SEQ ID NO: 3669 - protein, 9 aa, Artificial Sequence
  HCV analog
TISGVLWQV

SEQ ID NO: 3670 - protein, 9 aa, Artificial Sequence
  HCV analog
SISGVLWQV

SEQ ID NO: 3671 - protein, 9 aa, Artificial Sequence
  HCV analog
SLMAFTASV

SEQ ID NO: 3672 - protein, 9 aa, Artificial Sequence
  HCV analog
GLRDCTMLV

SEQ ID NO: 3673 - protein, 10 aa, Artificial Sequence
  HCV analog
KLVALGVNAV

SEQ ID NO: 3674 - protein, 10 aa, Artificial Sequence
  HCV analog
YLLPSRGPKL

SEQ ID NO: 3675 - protein, 10 aa, Artificial Sequence
  HCV analog
KLSGLGLNAV

SEQ ID NO: 3676 - protein, 10 aa, Artificial Sequence
  HCV analog
YVLPRRGPRL

SEQ ID NO: 3677 - protein, 10 aa, Artificial Sequence
  HCV analog
VFFNILGGWV

SEQ ID NO: 3678 - protein, 10 aa, Artificial Sequence
  HCV analog
KLVSLGVNAV

SEQ ID NO: 3679 - protein, 9 aa, Artificial Sequence
  HCV analog
CINGVCWTA

SEQ ID NO: 3680 - protein, 9 aa, Artificial Sequence
  HCV analog
CANGVCWTV

SEQ ID NO: 3681 - protein, 9 aa, Artificial Sequence
  HCV analog
CVNGVCWAV

SEQ ID NO: 3682 - protein, 9 aa, Artificial Sequence
  HLA DR7-specific preferred motif
  misc_feature (1)..(1): Xaa is Met, Phe, Leu, Ile, Val, Trp or Tyr
  misc_feature (5)..(5): Xaa is any amino acid
  misc_feature (6)..(6): Xaa is Ile, Val, Met, Ser, Ala, Cys, Thr, Pro or Leu
  misc_feature (8)..(8): Xaa is any amino acid
  misc_feature (9)..(9): Xaa is Ile or Val
XMWAXXMXX

SEQ ID NO: 3683 - protein, 9 aa, Artificial Sequence
  HLA DR7-specific deleterious motif
  misc_feature (1)..(1): Xaa is any amino acid
  misc_feature (3)..(3): Xaa is any amino acid
  misc_feature (5)..(5): Xaa is any amino acid
  misc_feature (6)..(6): Xaa is any amino acid
  misc_feature (7)..(7): Xaa is Gly, Arg or Asp
XCXGXXXNG

What is claimed is:

1. A peptide composition of less than 250 amino acid residues comprising a peptide epitope useful for inducing an immune response against hepatitis C virus (HCV) said epitope (a) having an amino acid sequence of about 8 to about 13 amino acid residues that have at least 65% identity with a native amino acid sequence of HBV and, (b) binding to at least one HLA class I HLA allele with an IC₅₀ of less than about 500 nM.

2. The composition of claim 1, further wherein said peptide has at least 77% identity with a native HCV amino acid sequence.

3. The composition of claim 1, further wherein said peptide has 100% identity with a native HCV amino acid sequence.

4. A pharmaceutical composition comprising a peptide and a pharmaceutical carrier, wherein the peptide is a peptide of Table VII (A1 supermotif), Table VIII (A2 supermotif/A*0201 motif), Table IX (A3 supermotif), Table X (A24 supermotif), Table XI (B7 supermotif), Table XII (B27 supermotif), Table XIII (B58 supermotif), Table XIV (B62 supermotif), Table XV (A1 motif), Table XVI (A3 motif), Table XVII (A11 motif), or Table XVIII (A24 motif) comprising an IC₅₀ of less than about 500 nM for at least one HLA class I molecule.

5. The pharmaceutical composition of claim 4 wherein the composition comprises the peptide in a form of nucleic acids that encode the peptide.

6. The pharmaceutical composition of claim 5 wherein the composition comprises the peptide in a form of nucleic acids that encode the epitope and one or more additional peptide(s).

7. The composition of claim 4, wherein the peptide is comprised by a longer peptide, with a proviso that the longer peptide is not an entire native antigen.

8. The pharmaceutical composition of claim 4 wherein the peptide is in a human dose form, and the carrier is in a human unit dose.

9. A peptide composition of claim 1 comprising an analog of a peptide epitope, wherein the peptide epitope is an epitope of Table VII (A1 supermotif), Table VIII (A2 supemmotif/A2.1 motif), Table IX (A3 supermotif), Table X (A24 supermotif), Table XI (B7 supermotif), Table XII (B27 supermotif), Table XIII (B58 supermotif), Table XIV (B62 supermotif), Table XV (A1 motif), Table XVI (A3 motif), Table XVII (A11 motif), or Table XVIII (A24 motif), said analog comprising a preferred or less preferred amino acid of Table II substituted in for a starting residue, or having a deleterious residue of Table II substituted out of the starting sequence and replaced by a non-deleterious residue.

10. A peptide composition of claim 1 comprising a peptide of Table XXII.

11. A method for inducing a cytotoxic T lymphocyte response, said method comprising steps of:
providing a peptide that comprises an IC₅₀ of less than about 500 nM for an HLA class I molecule, wherein the peptide is a peptide of Table VII (A1 supermotif), Table VIII (A2 supermotif/A2.1 motif), Table IX (A3 supermotif), Table X (A24 supermotif), Table XI (B7 supermotif), Table XII (B27 supermotif), Table XIII (B58 supermotif), Table XIV (B62 supermotif), Table XV (A1 motif), Table XVI (A3 motif), Table XVII (A11 motif), or Table XVIII (A24 motif); and,
administering said peptide to a human.

12. The method of claim 11, wherein the providing step provides the peptide in a form of nucleic acids that encode the peptide.

13. The method of claim 12, wherein the providing step provides the peptide in a form of nucleic acids that encode the peptide and at least one additional peptide, with a proviso that an additional peptide is not an entire native antigen.

14. The method of claim 11, wherein the providing step provides the peptide comprised by a longer peptide, with a proviso that the longer peptide is not an entire native antigen.

15. A method for inducing a cytotoxic T lymphocyte response, said method comprising steps of:
providing a peptide that induces a cytotoxic T cell response in vitro and/or in vivo, wherein the peptide is a peptide of Table VII (A1 supermotif), Table VIII (A2 supermotif/A2.1 motif), Table IX (A3 supermotif), Table X (A24 supermotif), Table XI (B7 supermotif), Table XII (B27 supermotif), Table XIII (B58 supermotif), Table XIV (B62 supermotif), Table XV (A1 motif), Table XVI (A3 motif), Table XVII (A11 motif), Table XVIII (A24 motif) or Table XXIII; and,
administering said pharmaceutical composition to a human.

16. The method of claim 15, wherein the providing step provides the peptide in a form of nucleic acids that encode the peptide.

17. The method of claim 16, wherein the providing step provides the peptide in a form of nucleic acids that encode the peptide and at least one additional peptide, with a proviso that an additional peptide is not an entire native antigen.

18. The method of claim 15, wherein the providing step provides the peptide comprised by a longer peptide, with a proviso that the longer peptide is not an entire native antigen.

19. The method of claim 15, wherein the providing step comprises a peptide that induces a cytotoxic T cell response when complexed with an HLA class I molecule and is presented to an HLA class I-restricted cytotoxic T cell.

20. A peptide composition of less than 250 amino acid residues comprising a peptide epitope useful for inducing an immune response against hepatitis B virus (HCV) said epitope (a) having an amino acid sequence of about 6 to about 25 amino acid residues that have at least 65% identity with a native amino acid sequence of HCV and, (b) binding to at least one HLA class II HLA allele with an IC₅₀ of less than about 1000 nM.

21. The composition of claim 20, further wherein said peptide has at least 77% identity with a native HCV amino acid sequence.

22. The composition of claim 20, further wherein said peptide has 100% identity with a native HCV amino acid sequence.

23. A pharmaceutical composition comprising:
a human dose form of a peptide of Table XIX or Table XX that comprises an IC₅₀ of less than about 1,000 nM for at least one HLA DR molecule of an HLA DR supertype; and,
a human dose of a pharmaceutically acceptable carrier.

24. The pharmaceutical composition of claim 23 wherein the composition comprises the peptide in a form of nucleic acids that encode the peptide.

25. The pharmaceutical composition of claim 24 wherein the composition comprises the peptide in a form of nucleic acids that encode the peptide and at least one additional peptide, with a proviso that an additional peptide is not an entire native antigen.

26. The composition of claim 25, wherein the peptide is comprised by a longer peptide, with a proviso that the longer peptide is not an entire native antigen.

27. A peptide composition of claim 20 comprising an analog of a peptide epitope of Table XIX or Table XX, said analog comprising a preferred or less preferred amino acid of Table III substituted in for a starting residue, and/or having a deleterious residue of Table III substituted out of the starting sequence and replaced by a non-deleterious residue.

28. A method for inducing a helper T lymphocyte response, said method comprising steps of:
providing a peptide that comprises an IC₅₀ of less than about 1,000 nM for an HLA class II molecule, wherein the peptide is a peptide of Table XIX or Table XX; and,
administering said peptide to a human.

29. The method of claim 28, wherein the providing step provides the peptide in a form of nucleic acids that encode the peptide.

30. The method of claim 29, wherein the providing step provides the peptide in a form of nucleic acids that encode the peptide and at least one additional peptide, with a proviso that an additional peptide is not an entire native antigen.

31. The method of claim 28, wherein the providing step provides the peptide comprised by a longer peptide, with a proviso that the longer peptide is not an entire native antigen.

32. A method for inducing a helper T lymphocyte response, said method comprising steps of:
providing a peptide that induces a helper T cell response in vitro and/or in vivo, wherein the peptide is a peptide of Table XIX or Table XX; and,
administering said pharmaceutical composition to a human.

33. The method of claim 32, wherein the providing step provides the peptide in a form of nucleic acids that encode the peptide.

34. The method of claim 33, wherein the providing step provides the peptide in a form of nucleic acids that encode the peptide and at least one additional peptide, with a proviso that an additional peptide is not an entire native antigen.

35. The method of claim 32, wherein the providing step provides the peptide comprised by a longer peptide, with a proviso that the longer peptide is not an entire native antigen.

36. The method of claim 32, wherein the providing step comprises a peptide that induces a helper T cell response when complexed with an HLA class II molecule and is presented to an HLA class I-restricted helper T cell.

37. A vaccine for preventing or treating HCV infection that induces a protective or therapeutic immune response, wherein said vaccine comprises:
at least one peptide selected from Table(s) VII-XX or Table XXII; and,
a pharmaceutically acceptable carrier.

38. A kit for a vaccine that induces a protective or therapeutic immune response to HCV, said vaccine comprising:
at least one peptide selected from Table(s) VII-XX or Table XXII;
a pharmaceutically acceptable carrier; and,
instructions for administration to a patient.

39. A method for monitoring or evaluating an immune response to HCV or an epitope thereof in a patient having a known HLA type, the method comprising:
incubating a T lymphocyte sample from the patient with a peptide selected from Table(s) VII-XX or Table XXII, wherein that peptide bears a motif corresponding to at least one HLA allele present in said patient; and,
detecting the presence of a T lymphocyte that recognizes the peptide.

40. The method of claim 39, wherein the peptide is comprised by a tetrameric complex.

41. A pharmaceutical composition comprising a pharmaceutically acceptable carrier and combination of motif-bearing peptides that are immunologically cross-reactive with hepatitis C virus-1 (HCV-1), wherein at least one of the peptides bears a motif of Table Ia, and further wherein the combination of motif-bearing peptides consists of:
a) one or more peptides comprising at least 8 amino acids from an HCV C domain, the HCV C domain consisting of amino acids 1-120 of the HCV polyprotein;
b) one more peptides comprising at least 8 amino acids of a further domain, wherein the further domain is selected from the group consisting of:
an S domain, the S domain consisting of amino acids 120-400 of the HCV polyprotein;
an NS3 domain, the NS3 domain consisting of amino acids 1050 to 1640 of the HCV polyprotein;
an NS4 domain, the NS4 domain consisting of amino acids 1640 to 2000 of the HCV polyprotein; and,
an NS5 domain, the NS5 domain consisting of amino acids 2000 to 3011 of the HCV polyprotein; and,

42. The composition of claim 41, wherein the composition further comprises one or more additional HCV motif-bearing peptide(s) that are one or more distinct HCV peptides comprising at least 8 amino acids of an X domain, the X domain consisting of amino acids 750 to 1050 of the HCV polyprotein.

43. A pharmaceutical composition comprising a pharmaceutically acceptable carrier and combination of motif-bearing peptides that are immunologically cross-reactive with peptides of hepatitis C virus-1 (HCV-1), the peptides from multiple domains of HCV, wherein at least one of the peptides bears a motif of Table Ia, and further wherein the combination of peptides consists essentially of:
a) one or more peptides comprising at least 8 amino acids from a C domain, the C domain consisting of amino acids 1 to 120 of an HCV polyprotein; and,
b) one or more peptides comprising at least 8 amino acids from an S domain, the S domain consisting of amino acids 120-400 of the HCV polyprotein; or,
one or more peptides comprising at least 8 amino acids from an NS3 domain, the NS3 domain consisting of amino acids 1050 to 1640 of the HCV polyprotein; or,
one or more peptides comprising at least 8 amino acids from an NS4 domain, the NS4 domain consisting of amino acids 1640 to 2000 of the HCV polyprotein; or,
one or more peptides comprising at least 8 amino acids from an NS5 domain, the NS5 domain consisting of amino acids 2000 to 3011 of the HCV polyprotein; and,
c) one HCV peptide comprising at least 8 amino acids of an envelope domain, the envelope domain consisting of amino acids 192 to 750 of the HCV polyprotein.

44. The composition of claim 43, wherein the composition further comprises one or more HCV peptides comprising at least 8 amino acids of an X domain, the X domain consisting of amino acids 750 to 1050 of the HCV polyprotein.

45. A pharmaceutical composition comprising:
a) a pharmaceutically acceptable carrier; and,
b) a combination of one or more motif-bearing peptides of at least 8 amino acids derived from one or more hepatitis C virus (HCV) domains, wherein said motif-bearing peptides are immunologically cross-reactive with peptides of HCV-1, with a proviso that the combination does not include a peptide of at least 8 amino acids from an HCV C domain, the C domain consisting of amino acids 1 to 120 of an HCV polyprotein, and wherein at least one of the peptides bears a motif of Table Ia, said domains selected from the group consisting of:
an S domain, the S domain consisting of amino acids 120-400 of the HCV polyprotein;
an NS3 domain, the NS3 domain consisting of amino acids 1050 to 1640 of the HCV polyprotein;
an NS4 domain, the NS4 domain consisting of amino acids 1640 to 2000 of the HCV polyprotein;
an NS5 domain, the NS5 domain consisting of amino acids 2000 to 3011 of the HCV polyprotein; and,
an X domain, the X domain consisting of amino acids 750 to 1050 of the HCV polyprotein.

46. The composition of claim 45 further comprising:
HCV motif-bearing envelope peptide(s) consisting of one or more copies of a single HCV peptide comprising at least 8 amino acids of an envelope domain, the envelope domain consisting of amino acids 192 to 750 of the HCV polyprotein.

47. A pharmaceutical composition comprising a pharmaceutically acceptable carrier and combination of two or more motif-bearing peptides from a single domain of an hepatitis C virus strain, said peptides immunologically cross-reactive with peptides of a hepatitis C virus 1 (HCV) antigen,
wherein at least one of the peptides bears a motif of Table Ia., and the peptides are derived from HCV, and the HCV domain is selected from the group consisting of:
a C domain, the C domain consisting of amino acids 1 to 120 of an HCV polyprotein;
an S domain, the S domain consisting of amino acids 120-400 of the HCV polyprotein;
an NS3 domain, the NS3 domain consisting of amino acids 1050 to 1640 of the HCV polyprotein;
an NS4 domain, the NS4 domain consisting of amino acids 1640 to 2000 of the HCV polyprotein;
an NS5 domain, the NS5 domain consisting of amino acids 2000 to 3011 of the HCV polyprotein;
an X domain, the X domain consisting of amino acids 750 to 1050 of the HCV polyprotein; and,
an envelope domain, from a single HCV strain, the envelope domain consisting of amino acids 192 to 750 of the HCV polyprotein, with a proviso that the envelope domain is other than a variable envelope domain.
